United States Patent Application Publication US 2022/0175960 A1 - sequence listing, part 4

SEQ ID NO: 110848 - DNA, 26 bp, Homo sapiens
ggtggcattctctgactcagagagac

SEQ ID NO: 110849 - DNA, 26 bp, Homo sapiens
gtggcattctctgactcagagagact

SEQ ID NO: 110850 - DNA, 26 bp, Homo sapiens
tggcattctctgactcagagagactg

SEQ ID NO: 110851 - DNA, 26 bp, Homo sapiens
ggcattctctgactcagagagactgc

SEQ ID NO: 110852 - DNA, 26 bp, Homo sapiens
gcattctctgactcagagagactgct

SEQ ID NO: 110853 - DNA, 26 bp, Homo sapiens
cattctctgactcagagagactgctc

SEQ ID NO: 110854 - DNA, 26 bp, Homo sapiens
attctctgactcagagagactgctcc

SEQ ID NO: 110855 - DNA, 26 bp, Homo sapiens
ttctctgactcagagagactgctcct

SEQ ID NO: 110856 - DNA, 26 bp, Homo sapiens
tctctgactcagagagactgctcctg

SEQ ID NO: 110857 - DNA, 26 bp, Homo sapiens
ctctgactcagagagactgctcctgc

SEQ ID NO: 110858 - DNA, 26 bp, Homo sapiens
tctgactcagagagactgctcctgcg

SEQ ID NO: 110859 - DNA, 26 bp, Homo sapiens
ctgactcagagagactgctcctgcgc

SEQ ID NO: 110860 - DNA, 26 bp, Homo sapiens
tgactcagagagactgctcctgcgcc

SEQ ID NO: 110861 - DNA, 26 bp, Homo sapiens
gactcagagagactgctcctgcgcca

SEQ ID NO: 110862 - DNA, 26 bp, Homo sapiens
actcagagagactgctcctgcgccag

SEQ ID NO: 110863 - DNA, 26 bp, Homo sapiens
ctcagagagactgctcctgcgccagc

SEQ ID NO: 110864 - DNA, 26 bp, Homo sapiens
tcagagagactgctcctgcgccagct

SEQ ID NO: 110865 - DNA, 26 bp, Homo sapiens
cagagagactgctcctgcgccagcta

SEQ ID NO: 110866 - DNA, 26 bp, Homo sapiens
agagagactgctcctgcgccagctag

SEQ ID NO: 110867 - DNA, 26 bp, Homo sapiens
gagagactgctcctgcgccagctagg

SEQ ID NO: 110868 - DNA, 26 bp, Homo sapiens
agagactgctcctgcgccagctaggg

SEQ ID NO: 110869 - DNA, 26 bp, Homo sapiens
gagactgctcctgcgccagctaggga

SEQ ID NO: 110870 - DNA, 26 bp, Homo sapiens
agactgctcctgcgccagctagggaa

SEQ ID NO: 110871 - DNA, 26 bp, Homo sapiens
gactgctcctgcgccagctagggaag

SEQ ID NO: 110872 - DNA, 26 bp, Homo sapiens
actgctcctgcgccagctagggaaga

SEQ ID NO: 110873 - DNA, 26 bp, Homo sapiens
ctgctcctgcgccagctagggaagag

SEQ ID NO: 110874 - DNA, 26 bp, Homo sapiens
tgctcctgcgccagctagggaagagc

SEQ ID NO: 110875 - DNA, 26 bp, Homo sapiens
gctcctgcgccagctagggaagagct

SEQ ID NO: 110876 - DNA, 26 bp, Homo sapiens
ctcctgcgccagctagggaagagctg

SEQ ID NO: 110877 - DNA, 26 bp, Homo sapiens
tcctgcgccagctagggaagagctgg

SEQ ID NO: 110878 - DNA, 26 bp, Homo sapiens
cctgcgccagctagggaagagctggc

SEQ ID NO: 110879 - DNA, 26 bp, Homo sapiens
ctgcgccagctagggaagagctggca

SEQ ID NO: 110880 - DNA, 26 bp, Homo sapiens
tgcgccagctagggaagagctggcac

SEQ ID NO: 110881 - DNA, 26 bp, Homo sapiens
gcgccagctagggaagagctggcaca

SEQ ID NO: 110882 - DNA, 26 bp, Homo sapiens
cgccagctagggaagagctggcacag

SEQ ID NO: 110883 - DNA, 26 bp, Homo sapiens
gccagctagggaagagctggcacagg

SEQ ID NO: 110884 - DNA, 26 bp, Homo sapiens
ccagctagggaagagctggcacaggg

SEQ ID NO: 110885 - DNA, 26 bp, Homo sapiens
cagctagggaagagctggcacaggga

SEQ ID NO: 110886 - DNA, 26 bp, Homo sapiens
agctagggaagagctggcacagggag

SEQ ID NO: 110887 - DNA, 26 bp, Homo sapiens
gctagggaagagctggcacagggagg

SEQ ID NO: 110888 - DNA, 26 bp, Homo sapiens
ctagggaagagctggcacagggaggc

SEQ ID NO: 110889 - DNA, 26 bp, Homo sapiens
tagggaagagctggcacagggaggca

SEQ ID NO: 110890 - DNA, 26 bp, Homo sapiens
agggaagagctggcacagggaggcag

SEQ ID NO: 110891 - DNA, 26 bp, Homo sapiens
gggaagagctggcacagggaggcagg

SEQ ID NO: 110892 - DNA, 26 bp, Homo sapiens
ggaagagctggcacagggaggcaggg

SEQ ID NO: 110893 - DNA, 26 bp, Homo sapiens
gaagagctggcacagggaggcagggc

SEQ ID NO: 110894 - DNA, 26 bp, Homo sapiens
aagagctggcacagggaggcagggcc

SEQ ID NO: 110895 - DNA, 26 bp, Homo sapiens
agagctggcacagggaggcagggccg

SEQ ID NO: 110896 - DNA, 26 bp, Homo sapiens
gagctggcacagggaggcagggccgg

SEQ ID NO: 110897 - DNA, 26 bp, Homo sapiens
agctggcacagggaggcagggccggt

SEQ ID NO: 110898 - DNA, 26 bp, Homo sapiens
gctggcacagggaggcagggccggta

SEQ ID NO: 110899 - DNA, 26 bp, Homo sapiens
ctggcacagggaggcagggccggtac

SEQ ID NO: 110900 - DNA, 26 bp, Homo sapiens
tggcacagggaggcagggccggtaca

SEQ ID NO: 110901 - DNA, 26 bp, Homo sapiens
ggcacagggaggcagggccggtacag

SEQ ID NO: 110902 - DNA, 26 bp, Homo sapiens
gcacagggaggcagggccggtacagc

SEQ ID NO: 110903 - DNA, 26 bp, Homo sapiens
cacagggaggcagggccggtacagcc

SEQ ID NO: 110904 - DNA, 26 bp, Homo sapiens
acagggaggcagggccggtacagccc

SEQ ID NO: 110905 - DNA, 26 bp, Homo sapiens
cagggaggcagggccggtacagccca

SEQ ID NO: 110906 - DNA, 26 bp, Homo sapiens
agggaggcagggccggtacagcccag

SEQ ID NO: 110907 - DNA, 26 bp, Homo sapiens
gggaggcagggccggtacagcccagc

SEQ ID NO: 110908 - DNA, 26 bp, Homo sapiens
ggaggcagggccggtacagcccagct

SEQ ID NO: 110909 - DNA, 26 bp, Homo sapiens
gaggcagggccggtacagcccagctt

SEQ ID NO: 110910 - DNA, 26 bp, Homo sapiens
aggcagggccggtacagcccagcttc

SEQ ID NO: 110911 - DNA, 26 bp, Homo sapiens
ggcagggccggtacagcccagcttcg

SEQ ID NO: 110912 - DNA, 26 bp, Homo sapiens
gcagggccggtacagcccagcttcgt

SEQ ID NO: 110913 - DNA, 26 bp, Homo sapiens
cagggccggtacagcccagcttcgtc

SEQ ID NO: 110914 - DNA, 26 bp, Homo sapiens
agggccggtacagcccagcttcgtca

SEQ ID NO: 110915 - DNA, 26 bp, Homo sapiens
gggccggtacagcccagcttcgtcag

SEQ ID NO: 110916 - DNA, 26 bp, Homo sapiens
ggccggtacagcccagcttcgtcagg

SEQ ID NO: 110917 - DNA, 26 bp, Homo sapiens
gccggtacagcccagcttcgtcagga

SEQ ID NO: 110918 - DNA, 26 bp, Homo sapiens
ccggtacagcccagcttcgtcaggag

SEQ ID NO: 110919 - DNA, 26 bp, Homo sapiens
cggtacagcccagcttcgtcaggagc

SEQ ID NO: 110920 - DNA, 26 bp, Homo sapiens
ggtacagcccagcttcgtcaggagcc

SEQ ID NO: 110921 - DNA, 26 bp, Homo sapiens
gtacagcccagcttcgtcaggagccg

SEQ ID NO: 110922 - DNA, 26 bp, Homo sapiens
tacagcccagcttcgtcaggagccgc

SEQ ID NO: 110923 - DNA, 26 bp, Homo sapiens
acagcccagcttcgtcaggagccgcg

SEQ ID NO: 110924 - DNA, 26 bp, Homo sapiens
cagcccagcttcgtcaggagccgcga

SEQ ID NO: 110925 - DNA, 26 bp, Homo sapiens
agcccagcttcgtcaggagccgcgac

SEQ ID NO: 110926 - DNA, 26 bp, Homo sapiens
gcccagcttcgtcaggagccgcgaca

SEQ ID NO: 110927 - DNA, 26 bp, Homo sapiens
cccagcttcgtcaggagccgcgacag

SEQ ID NO: 110928 - DNA, 26 bp, Homo sapiens
ccagcttcgtcaggagccgcgacagg

SEQ ID NO: 110929 - DNA, 26 bp, Homo sapiens
cagcttcgtcaggagccgcgacaggt

SEQ ID NO: 110930 - DNA, 26 bp, Homo sapiens
agcttcgtcaggagccgcgacaggtc

SEQ ID NO: 110931 - DNA, 26 bp, Homo sapiens
gcttcgtcaggagccgcgacaggtca

SEQ ID NO: 110932 - DNA, 26 bp, Homo sapiens
cttcgtcaggagccgcgacaggtcac

SEQ ID NO: 110933 - DNA, 26 bp, Homo sapiens
ttcgtcaggagccgcgacaggtcact

SEQ ID NO: 110934 - DNA, 26 bp, Homo sapiens
tcgtcaggagccgcgacaggtcactg

SEQ ID NO: 110935 - DNA, 26 bp, Homo sapiens
cgtcaggagccgcgacaggtcactgc

SEQ ID NO: 110936 - DNA, 26 bp, Homo sapiens
gtcaggagccgcgacaggtcactgcg

SEQ ID NO: 110937 - DNA, 26 bp, Homo sapiens
tcaggagccgcgacaggtcactgcgg

SEQ ID NO: 110938 - DNA, 26 bp, Homo sapiens
caggagccgcgacaggtcactgcgga

SEQ ID NO: 110939 - DNA, 26 bp, Homo sapiens
aggagccgcgacaggtcactgcggaa

SEQ ID NO: 110940 - DNA, 26 bp, Homo sapiens
ggagccgcgacaggtcactgcggaac

SEQ ID NO: 110941 - DNA, 26 bp, Homo sapiens
gagccgcgacaggtcactgcggaact

SEQ ID NO: 110942 - DNA, 26 bp, Homo sapiens
agccgcgacaggtcactgcggaactt

SEQ ID NO: 110943 - DNA, 26 bp, Homo sapiens
gccgcgacaggtcactgcggaacttc

SEQ ID NO: 110944 - DNA, 26 bp, Homo sapiens
ccgcgacaggtcactgcggaacttca

SEQ ID NO: 110945 - DNA, 26 bp, Homo sapiens
cgcgacaggtcactgcggaacttcac

SEQ ID NO: 110946 - DNA, 26 bp, Homo sapiens
gcgacaggtcactgcggaacttcacg

SEQ ID NO: 110947 - DNA, 26 bp, Homo sapiens
cgacaggtcactgcggaacttcacgc

SEQ ID NO: 110948 - DNA, 26 bp, Homo sapiens
gacaggtcactgcggaacttcacgcc

SEQ ID NO: 110949 - DNA, 26 bp, Homo sapiens
acaggtcactgcggaacttcacgccg

SEQ ID NO: 110950 - DNA, 26 bp, Homo sapiens
caggtcactgcggaacttcacgccgg

SEQ ID NO: 110951 - DNA, 26 bp, Homo sapiens
aggtcactgcggaacttcacgccggc

SEQ ID NO: 110952 - DNA, 26 bp, Homo sapiens
ggtcactgcggaacttcacgccggcg

SEQ ID NO: 110953 - DNA, 26 bp, Homo sapiens
gtcactgcggaacttcacgccggcga

SEQ ID NO: 110954 - DNA, 26 bp, Homo sapiens
tcactgcggaacttcacgccggcgaa

SEQ ID NO: 110955 - DNA, 26 bp, Homo sapiens
cactgcggaacttcacgccggcgaaa

SEQ ID NO: 110956 - DNA, 26 bp, Homo sapiens
actgcggaacttcacgccggcgaaag

SEQ ID NO: 110957 - DNA, 26 bp, Homo sapiens
ctgcggaacttcacgccggcgaaagt

SEQ ID NO: 110958 - DNA, 26 bp, Homo sapiens
tgcggaacttcacgccggcgaaagtg

SEQ ID NO: 110959 - DNA, 26 bp, Homo sapiens
gcggaacttcacgccggcgaaagtgt

SEQ ID NO: 110960 - DNA, 26 bp, Homo sapiens
cggaacttcacgccggcgaaagtgta

SEQ ID NO: 110961 - DNA, 26 bp, Homo sapiens
ggaacttcacgccggcgaaagtgtag

SEQ ID NO: 110962 - DNA, 26 bp, Homo sapiens
gaacttcacgccggcgaaagtgtaga

SEQ ID NO: 110963 - DNA, 26 bp, Homo sapiens
aacttcacgccggcgaaagtgtagag

SEQ ID NO: 110964 - DNA, 26 bp, Homo sapiens
acttcacgccggcgaaagtgtagagc

SEQ ID NO: 110965 - DNA, 26 bp, Homo sapiens
cttcacgccggcgaaagtgtagagca

SEQ ID NO: 110966 - DNA, 26 bp, Homo sapiens
ttcacgccggcgaaagtgtagagcat

SEQ ID NO: 110967 - DNA, 26 bp, Homo sapiens
tcacgccggcgaaagtgtagagcatg

SEQ ID NO: 110968 - DNA, 26 bp, Homo sapiens
cacgccggcgaaagtgtagagcatgg

SEQ ID NO: 110969 - DNA, 26 bp, Homo sapiens
acgccggcgaaagtgtagagcatggg

SEQ ID NO: 110970 - DNA, 26 bp, Homo sapiens
cgccggcgaaagtgtagagcatgggg

SEQ ID NO: 110971 - DNA, 26 bp, Homo sapiens
gccggcgaaagtgtagagcatggggt

SEQ ID NO: 110972 - DNA, 26 bp, Homo sapiens
ccggcgaaagtgtagagcatggggtt

SEQ ID NO: 110973 - DNA, 26 bp, Homo sapiens
cggcgaaagtgtagagcatggggttg

SEQ ID NO: 110974 - DNA, 26 bp, Homo sapiens
ggcgaaagtgtagagcatggggttga

SEQ ID NO: 110975 - DNA, 26 bp, Homo sapiens
gcgaaagtgtagagcatggggttgag

SEQ ID NO: 110976 - DNA, 26 bp, Homo sapiens
cgaaagtgtagagcatggggttgagg

SEQ ID NO: 110977 - DNA, 26 bp, Homo sapiens
gaaagtgtagagcatggggttgaggc

SEQ ID NO: 110978 - DNA, 26 bp, Homo sapiens
aaagtgtagagcatggggttgaggca

SEQ ID NO: 110979 - DNA, 26 bp, Homo sapiens
aagtgtagagcatggggttgaggcag

SEQ ID NO: 110980 - DNA, 26 bp, Homo sapiens
agtgtagagcatggggttgaggcagc

SEQ ID NO: 110981 - DNA, 26 bp, Homo sapiens
gtgtagagcatggggttgaggcagca

SEQ ID NO: 110982 - DNA, 26 bp, Homo sapiens
tgtagagcatggggttgaggcagcag

SEQ ID NO: 110983 - DNA, 26 bp, Homo sapiens
gtagagcatggggttgaggcagcagt

SEQ ID NO: 110984 - DNA, 26 bp, Homo sapiens
tagagcatggggttgaggcagcagtg

SEQ ID NO: 110985 - DNA, 26 bp, Homo sapiens
agagcatggggttgaggcagcagtgg

SEQ ID NO: 110986 - DNA, 26 bp, Homo sapiens
gagcatggggttgaggcagcagtggg

SEQ ID NO: 110987 - DNA, 26 bp, Homo sapiens
agcatggggttgaggcagcagtgggc

SEQ ID NO: 110988 - DNA, 26 bp, Homo sapiens
gcatggggttgaggcagcagtgggcc

SEQ ID NO: 110989 - DNA, 26 bp, Homo sapiens
catggggttgaggcagcagtgggcca

SEQ ID NO: 110990 - DNA, 26 bp, Homo sapiens
atggggttgaggcagcagtgggccag

SEQ ID NO: 110991 - DNA, 26 bp, Homo sapiens
tggggttgaggcagcagtgggccagg

SEQ ID NO: 110992 - DNA, 26 bp, Homo sapiens
ggggttgaggcagcagtgggccaggc

SEQ ID NO: 110993 - DNA, 26 bp, Homo sapiens
gggttgaggcagcagtgggccaggcc

SEQ ID NO: 110994 - DNA, 26 bp, Homo sapiens
ggttgaggcagcagtgggccaggccc

SEQ ID NO: 110995 - DNA, 26 bp, Homo sapiens
gttgaggcagcagtgggccaggccca

SEQ ID NO: 110996 - DNA, 26 bp, Homo sapiens
ttgaggcagcagtgggccaggcccag

SEQ ID NO: 110997 - DNA, 26 bp, Homo sapiens
tgaggcagcagtgggccaggcccagg

SEQ ID NO: 110998 - DNA, 26 bp, Homo sapiens
gaggcagcagtgggccaggcccagga

SEQ ID NO: 110999 - DNA, 26 bp, Homo sapiens
aggcagcagtgggccaggcccaggaa

SEQ ID NO: 111000 - DNA, 26 bp, Homo sapiens
ggcagcagtgggccaggcccaggaac

SEQ ID NO: 111001 - DNA, 26 bp, Homo sapiens
gcagcagtgggccaggcccaggaact

SEQ ID NO: 111002 - DNA, 26 bp, Homo sapiens
cagcagtgggccaggcccaggaactc

SEQ ID NO: 111003 - DNA, 26 bp, Homo sapiens
agcagtgggccaggcccaggaactca

SEQ ID NO: 111004 - DNA, 26 bp, Homo sapiens
gcagtgggccaggcccaggaactcac

SEQ ID NO: 111005 - DNA, 26 bp, Homo sapiens
cagtgggccaggcccaggaactcaca

SEQ ID NO: 111006 - DNA, 26 bp, Homo sapiens
agtgggccaggcccaggaactcacac

SEQ ID NO: 111007 - DNA, 26 bp, Homo sapiens
gtgggccaggcccaggaactcacaca

SEQ ID NO: 111008 - DNA, 26 bp, Homo sapiens
tgggccaggcccaggaactcacacat

SEQ ID NO: 111009 - DNA, 26 bp, Homo sapiens
gggccaggcccaggaactcacacatg

SEQ ID NO: 111010 - DNA, 26 bp, Homo sapiens
ggccaggcccaggaactcacacatgg

SEQ ID NO: 111011 - DNA, 26 bp, Homo sapiens
gccaggcccaggaactcacacatggt

SEQ ID NO: 111012 - DNA, 26 bp, Homo sapiens
ccaggcccaggaactcacacatggtg

SEQ ID NO: 111013 - DNA, 26 bp, Homo sapiens
caggcccaggaactcacacatggtga

SEQ ID NO: 111014 - DNA, 26 bp, Homo sapiens
aggcccaggaactcacacatggtgat

SEQ ID NO: 111015 - DNA, 26 bp, Homo sapiens
ggcccaggaactcacacatggtgatg

SEQ ID NO: 111016 - DNA, 26 bp, Homo sapiens
gcccaggaactcacacatggtgatgg

SEQ ID NO: 111017 - DNA, 26 bp, Homo sapiens
cccaggaactcacacatggtgatggc

SEQ ID NO: 111018 - DNA, 26 bp, Homo sapiens
ccaggaactcacacatggtgatggcc

SEQ ID NO: 111019 - DNA, 26 bp, Homo sapiens
caggaactcacacatggtgatggcca

SEQ ID NO: 111020 - DNA, 26 bp, Homo sapiens
aggaactcacacatggtgatggccac

SEQ ID NO: 111021 - DNA, 26 bp, Homo sapiens
ggaactcacacatggtgatggccacg

SEQ ID NO: 111022 - DNA, 26 bp, Homo sapiens
gaactcacacatggtgatggccacgg

SEQ ID NO: 111023 - DNA, 26 bp, Homo sapiens
aactcacacatggtgatggccacggg

SEQ ID NO: 111024 - DNA, 26 bp, Homo sapiens
actcacacatggtgatggccacgggg

SEQ ID NO: 111025 - DNA, 26 bp, Homo sapiens
ctcacacatggtgatggccacgggga

SEQ ID NO: 111026 - DNA, 26 bp, Homo sapiens
tcacacatggtgatggccacggggag

SEQ ID NO: 111027 - DNA, 26 bp, Homo sapiens
cacacatggtgatggccacggggaga

SEQ ID NO: 111028 - DNA, 26 bp, Homo sapiens
acacatggtgatggccacggggagag

SEQ ID NO: 111029 - DNA, 26 bp, Homo sapiens
cacatggtgatggccacggggagaga

SEQ ID NO: 111030 - DNA, 26 bp, Homo sapiens
acatggtgatggccacggggagagag

SEQ ID NO: 111031 - DNA, 26 bp, Homo sapiens
catggtgatggccacggggagagagc

SEQ ID NO: 111032 - DNA, 26 bp, Homo sapiens
atggtgatggccacggggagagagcc

SEQ ID NO: 111033 - DNA, 26 bp, Homo sapiens
tggtgatggccacggggagagagcca

SEQ ID NO: 111034 - DNA, 26 bp, Homo sapiens
ggtgatggccacggggagagagccat

SEQ ID NO: 111035 - DNA, 26 bp, Homo sapiens
gtgatggccacggggagagagccatt

SEQ ID NO: 111036 - DNA, 26 bp, Homo sapiens
tgatggccacggggagagagccattc

SEQ ID NO: 111037 - DNA, 26 bp, Homo sapiens
gatggccacggggagagagccattca

SEQ ID NO: 111038 - DNA, 26 bp, Homo sapiens
atggccacggggagagagccattcag

SEQ ID NO: 111039 - DNA, 26 bp, Homo sapiens
tggccacggggagagagccattcagc

SEQ ID NO: 111040 - DNA, 26 bp, Homo sapiens
ggccacggggagagagccattcagct

SEQ ID NO: 111041 - DNA, 26 bp, Homo sapiens
gccacggggagagagccattcagctt

SEQ ID NO: 111042 - DNA, 26 bp, Homo sapiens
ccacggggagagagccattcagcttg

SEQ ID NO: 111043 - DNA, 26 bp, Homo sapiens
cacggggagagagccattcagcttgc

SEQ ID NO: 111044 - DNA, 26 bp, Homo sapiens
acggggagagagccattcagcttgca

SEQ ID NO: 111045 - DNA, 26 bp, Homo sapiens
cggggagagagccattcagcttgcag

SEQ ID NO: 111046 - DNA, 26 bp, Homo sapiens
ggggagagagccattcagcttgcagg

SEQ ID NO: 111047 - DNA, 26 bp, Homo sapiens
gggagagagccattcagcttgcaggt

SEQ ID NO: 111048 - DNA, 26 bp, Homo sapiens
ggagagagccattcagcttgcaggta

SEQ ID NO: 111049 - DNA, 26 bp, Homo sapiens
gagagagccattcagcttgcaggtat

SEQ ID NO: 111050 - DNA, 26 bp, Homo sapiens
agagagccattcagcttgcaggtatt

SEQ ID NO: 111051 - DNA, 26 bp, Homo sapiens
gagagccattcagcttgcaggtattg

SEQ ID NO: 111052 - DNA, 26 bp, Homo sapiens
agagccattcagcttgcaggtattgt

SEQ ID NO: 111053 - DNA, 26 bp, Homo sapiens
gagccattcagcttgcaggtattgtc

SEQ ID NO: 111054 - DNA, 26 bp, Homo sapiens
agccattcagcttgcaggtattgtcc

SEQ ID NO: 111055 - DNA, 26 bp, Homo sapiens
gccattcagcttgcaggtattgtcca

SEQ ID NO: 111056 - DNA, 26 bp, Homo sapiens
ccattcagcttgcaggtattgtccac

SEQ ID NO: 111057 - DNA, 26 bp, Homo sapiens
cattcagcttgcaggtattgtccacg

SEQ ID NO: 111058 - DNA, 26 bp, Homo sapiens
attcagcttgcaggtattgtccacgg

SEQ ID NO: 111059 - DNA, 26 bp, Homo sapiens
ttcagcttgcaggtattgtccacggc

SEQ ID NO: 111060 - DNA, 26 bp, Homo sapiens
tcagcttgcaggtattgtccacggcc

SEQ ID NO: 111061 - DNA, 26 bp, Homo sapiens
cagcttgcaggtattgtccacggcct

SEQ ID NO: 111062 - DNA, 26 bp, Homo sapiens
agcttgcaggtattgtccacggcctt

SEQ ID NO: 111063 - DNA, 26 bp, Homo sapiens
gcttgcaggtattgtccacggccttc

SEQ ID NO: 111064 - DNA, 26 bp, Homo sapiens
cttgcaggtattgtccacggccttca

SEQ ID NO: 111065 - DNA, 26 bp, Homo sapiens
ttgcaggtattgtccacggccttcag

SEQ ID NO: 111066 - DNA, 26 bp, Homo sapiens
tgcaggtattgtccacggccttcagc

SEQ ID NO: 111067 - DNA, 26 bp, Homo sapiens
gcaggtattgtccacggccttcagcc

SEQ ID NO: 111068 - DNA, 26 bp, Homo sapiens
caggtattgtccacggccttcagcct

SEQ ID NO: 111069 - DNA, 26 bp, Homo sapiens
aggtattgtccacggccttcagcctc

SEQ ID NO: 111070 - DNA, 26 bp, Homo sapiens
ggtattgtccacggccttcagcctcg

SEQ ID NO: 111071 - DNA, 26 bp, Homo sapiens
gtattgtccacggccttcagcctcgc

SEQ ID NO: 111072 - DNA, 26 bp, Homo sapiens
tattgtccacggccttcagcctcgcc

SEQ ID NO: 111073 - DNA, 26 bp, Homo sapiens
attgtccacggccttcagcctcgcca

SEQ ID NO: 111074 - DNA, 26 bp, Homo sapiens
ttgtccacggccttcagcctcgccag

SEQ ID NO: 111075 - DNA, 26 bp, Homo sapiens
tgtccacggccttcagcctcgccagg

SEQ ID NO: 111076 - DNA, 26 bp, Homo sapiens
gtccacggccttcagcctcgccaggg

SEQ ID NO: 111077 - DNA, 26 bp, Homo sapiens
tccacggccttcagcctcgccagggt

SEQ ID NO: 111078 - DNA, 26 bp, Homo sapiens
ccacggccttcagcctcgccagggtg

SEQ ID NO: 111079 - DNA, 26 bp, Homo sapiens
cacggccttcagcctcgccagggtgt

SEQ ID NO: 111080 - DNA, 26 bp, Homo sapiens
acggccttcagcctcgccagggtgtc

SEQ ID NO: 111081 - DNA, 26 bp, Homo sapiens
cggccttcagcctcgccagggtgtcc

SEQ ID NO: 111082 - DNA, 26 bp, Homo sapiens
ggccttcagcctcgccagggtgtcca

SEQ ID NO: 111083 - DNA, 26 bp, Homo sapiens
gccttcagcctcgccagggtgtccag

SEQ ID NO: 111084 - DNA, 26 bp, Homo sapiens
ccttcagcctcgccagggtgtccagg

SEQ ID NO: 111085 - DNA, 26 bp, Homo sapiens
cttcagcctcgccagggtgtccagga

SEQ ID NO: 111086 - DNA, 26 bp, Homo sapiens
ttcagcctcgccagggtgtccaggaa

SEQ ID NO: 111087 - DNA, 26 bp, Homo sapiens
tcagcctcgccagggtgtccaggaag

SEQ ID NO: 111088 - DNA, 26 bp, Homo sapiens
cagcctcgccagggtgtccaggaaga

SEQ ID NO: 111089 - DNA, 26 bp, Homo sapiens
agcctcgccagggtgtccaggaagat

SEQ ID NO: 111090 - DNA, 26 bp, Homo sapiens
gcctcgccagggtgtccaggaagatg

SEQ ID NO: 111091 - DNA, 26 bp, Homo sapiens
cctcgccagggtgtccaggaagatga

SEQ ID NO: 111092 - DNA, 26 bp, Homo sapiens
ctcgccagggtgtccaggaagatgac

SEQ ID NO: 111093 - DNA, 26 bp, Homo sapiens
tcgccagggtgtccaggaagatgacg

SEQ ID NO: 111094 - DNA, 26 bp, Homo sapiens
cgccagggtgtccaggaagatgacga

SEQ ID NO: 111095 - DNA, 26 bp, Homo sapiens
gccagggtgtccaggaagatgacgat

SEQ ID NO: 111096 - DNA, 26 bp, Homo sapiens
ccagggtgtccaggaagatgacgatg

SEQ ID NO: 111097 - DNA, 26 bp, Homo sapiens
cagggtgtccaggaagatgacgatgt

SEQ ID NO: 111098 - DNA, 26 bp, Homo sapiens
agggtgtccaggaagatgacgatgtg

SEQ ID NO: 111099 - DNA, 26 bp, Homo sapiens
gggtgtccaggaagatgacgatgtgg

SEQ ID NO: 111100 - DNA, 26 bp, Homo sapiens
ggtgtccaggaagatgacgatgtggt

SEQ ID NO: 111101 - DNA, 26 bp, Homo sapiens
gtgtccaggaagatgacgatgtggta

SEQ ID NO: 111102 - DNA, 26 bp, Homo sapiens
tgtccaggaagatgacgatgtggtag

SEQ ID NO: 111103 - DNA, 26 bp, Homo sapiens
gtccaggaagatgacgatgtggtagg

SEQ ID NO: 111104 - DNA, 26 bp, Homo sapiens
tccaggaagatgacgatgtggtaggg

SEQ ID NO: 111105 - DNA, 26 bp, Homo sapiens
ccaggaagatgacgatgtggtagggt

SEQ ID NO: 111106 - DNA, 26 bp, Homo sapiens
caggaagatgacgatgtggtagggtg

SEQ ID NO: 111107 - DNA, 26 bp, Homo sapiens
aggaagatgacgatgtggtagggtga

SEQ ID NO: 111108 - DNA, 26 bp, Homo sapiens
ggaagatgacgatgtggtagggtgac

SEQ ID NO: 111109 - DNA, 26 bp, Homo sapiens
gaagatgacgatgtggtagggtgacc

SEQ ID NO: 111110 - DNA, 26 bp, Homo sapiens
aagatgacgatgtggtagggtgacca

SEQ ID NO: 111111 - DNA, 26 bp, Homo sapiens
agatgacgatgtggtagggtgaccag

SEQ ID NO: 111112 - DNA, 26 bp, Homo sapiens
gatgacgatgtggtagggtgaccagc

SEQ ID NO: 111113 - DNA, 26 bp, Homo sapiens
atgacgatgtggtagggtgaccagca

SEQ ID NO: 111114 - DNA, 26 bp, Homo sapiens
tgacgatgtggtagggtgaccagcag

SEQ ID NO: 111115 - DNA, 26 bp, Homo sapiens
gacgatgtggtagggtgaccagcaga

SEQ ID NO: 111116 - DNA, 26 bp, Homo sapiens
acgatgtggtagggtgaccagcagag

SEQ ID NO: 111117 - DNA, 26 bp, Homo sapiens
cgatgtggtagggtgaccagcagagg

SEQ ID NO: 111118 - DNA, 26 bp, Homo sapiens
gatgtggtagggtgaccagcagagga

SEQ ID NO: 111119 - DNA, 26 bp, Homo sapiens
atgtggtagggtgaccagcagaggaa

SEQ ID NO: 111120 - DNA, 26 bp, Homo sapiens
tgtggtagggtgaccagcagaggaag

SEQ ID NO: 111121 - DNA, 26 bp, Homo sapiens
gtggtagggtgaccagcagaggaaga

SEQ ID NO: 111122 - DNA, 26 bp, Homo sapiens
tggtagggtgaccagcagaggaagaa

SEQ ID NO: 111123 - DNA, 26 bp, Homo sapiens
ggtagggtgaccagcagaggaagaag

SEQ ID NO: 111124 - DNA, 26 bp, Homo sapiens
gtagggtgaccagcagaggaagaaga

SEQ ID NO: 111125 - DNA, 26 bp, Homo sapiens
tagggtgaccagcagaggaagaagat

SEQ ID NO: 111126 - DNA, 26 bp, Homo sapiens
agggtgaccagcagaggaagaagatg

SEQ ID NO: 111127 - DNA, 26 bp, Homo sapiens
gggtgaccagcagaggaagaagatgc

SEQ ID NO: 111128 - DNA, 26 bp, Homo sapiens
ggtgaccagcagaggaagaagatgct

SEQ ID NO: 111129 - DNA, 26 bp, Homo sapiens
gtgaccagcagaggaagaagatgctt

SEQ ID NO: 111130 - DNA, 26 bp, Homo sapiens
tgaccagcagaggaagaagatgcttg

SEQ ID NO: 111131 - DNA, 26 bp, Homo sapiens
gaccagcagaggaagaagatgcttgt

SEQ ID NO: 111132 - DNA, 26 bp, Homo sapiens
accagcagaggaagaagatgcttgtc

SEQ ID NO: 111133 - DNA, 26 bp, Homo sapiens
ccagcagaggaagaagatgcttgtca

SEQ ID NO: 111134 - DNA, 26 bp, Homo sapiens
cagcagaggaagaagatgcttgtcac

SEQ ID NO: 111135 - DNA, 26 bp, Homo sapiens
agcagaggaagaagatgcttgtcacc

SEQ ID NO: 111136 - DNA, 26 bp, Homo sapiens
gcagaggaagaagatgcttgtcacca

SEQ ID NO: 111137 - DNA, 26 bp, Homo sapiens
cagaggaagaagatgcttgtcaccag

SEQ ID NO: 111138 - DNA, 26 bp, Homo sapiens
agaggaagaagatgcttgtcaccagg

SEQ ID NO: 111139 - DNA, 26 bp, Homo sapiens
gaggaagaagatgcttgtcaccagga

SEQ ID NO: 111140 - DNA, 26 bp, Homo sapiens
aggaagaagatgcttgtcaccaggat

SEQ ID NO: 111141 - DNA, 26 bp, Homo sapiens
ggaagaagatgcttgtcaccaggatg

SEQ ID NO: 111142 - DNA, 26 bp, Homo sapiens
gaagaagatgcttgtcaccaggatgg

SEQ ID NO: 111143 - DNA, 26 bp, Homo sapiens
aagaagatgcttgtcaccaggatggc

SEQ ID NO: 111144 - DNA, 26 bp, Homo sapiens
agaagatgcttgtcaccaggatggcc

SEQ ID NO: 111145 - DNA, 26 bp, Homo sapiens
gaagatgcttgtcaccaggatggcca

SEQ ID NO: 111146 - DNA, 26 bp, Homo sapiens
aagatgcttgtcaccaggatggccac

SEQ ID NO: 111147 - DNA, 26 bp, Homo sapiens
agatgcttgtcaccaggatggccacc

SEQ ID NO: 111148 - DNA, 26 bp, Homo sapiens
gatgcttgtcaccaggatggccaccc

SEQ ID NO: 111149 - DNA, 26 bp, Homo sapiens
atgcttgtcaccaggatggccaccct

SEQ ID NO: 111150 - DNA, 26 bp, Homo sapiens
tgcttgtcaccaggatggccaccctg

SEQ ID NO: 111151 - DNA, 26 bp, Homo sapiens
gcttgtcaccaggatggccaccctga

SEQ ID NO: 111152 - DNA, 26 bp, Homo sapiens
cttgtcaccaggatggccaccctgac

SEQ ID NO: 111153 - DNA, 26 bp, Homo sapiens
ttgtcaccaggatggccaccctgact

SEQ ID NO: 111154 - DNA, 26 bp, Homo sapiens
tgtcaccaggatggccaccctgactg

SEQ ID NO: 111155 - DNA, 26 bp, Homo sapiens
gtcaccaggatggccaccctgactgc

SEQ ID NO: 111156 - DNA, 26 bp, Homo sapiens
tcaccaggatggccaccctgactgcc

SEQ ID NO: 111157 - DNA, 26 bp, Homo sapiens
caccaggatggccaccctgactgcct

SEQ ID NO: 111158 - DNA, 26 bp, Homo sapiens
accaggatggccaccctgactgcctt

SEQ ID NO: 111159 - DNA, 26 bp, Homo sapiens
ccaggatggccaccctgactgccttc

SEQ ID NO: 111160 - DNA, 26 bp, Homo sapiens
caggatggccaccctgactgccttct

SEQ ID NO: 111161 - DNA, 26 bp, Homo sapiens
aggatggccaccctgactgccttctg

SEQ ID NO: 111162 - DNA, 26 bp, Homo sapiens
ggatggccaccctgactgccttctgc

SEQ ID NO: 111163 - DNA, 26 bp, Homo sapiens
gatggccaccctgactgccttctgcc

SEQ ID NO: 111164 - DNA, 26 bp, Homo sapiens
atggccaccctgactgccttctgccg

SEQ ID NO: 111165 - DNA, 26 bp, Homo sapiens
tggccaccctgactgccttctgccgc

SEQ ID NO: 111166 - DNA, 26 bp, Homo sapiens
ggccaccctgactgccttctgccgct

SEQ ID NO: 111167 - DNA, 26 bp, Homo sapiens
gccaccctgactgccttctgccgctg

SEQ ID NO: 111168 - DNA, 26 bp, Homo sapiens
ccaccctgactgccttctgccgctga

SEQ ID NO: 111169 - DNA, 26 bp, Homo sapiens
caccctgactgccttctgccgctgag

SEQ ID NO: 111170 - DNA, 26 bp, Homo sapiens
accctgactgccttctgccgctgagg

SEQ ID NO: 111171 - DNA, 26 bp, Homo sapiens
ccctgactgccttctgccgctgaggg

SEQ ID NO: 111172 - DNA, 26 bp, Homo sapiens
cctgactgccttctgccgctgagggc

SEQ ID NO: 111173 - DNA, 26 bp, Homo sapiens
ctgactgccttctgccgctgagggcg

SEQ ID NO: 111174 - DNA, 26 bp, Homo sapiens
tgactgccttctgccgctgagggcgc

SEQ ID NO: 111175 - DNA, 26 bp, Homo sapiens
gactgccttctgccgctgagggcgcc

SEQ ID NO: 111176 - DNA, 26 bp, Homo sapiens
actgccttctgccgctgagggcgccg

SEQ ID NO: 111177 - DNA, 26 bp, Homo sapiens
ctgccttctgccgctgagggcgccgc

SEQ ID NO: 111178 - DNA, 26 bp, Homo sapiens
tgccttctgccgctgagggcgccgct

SEQ ID NO: 111179 - DNA, 26 bp, Homo sapiens
gccttctgccgctgagggcgccgctg

SEQ ID NO: 111180 - DNA, 26 bp, Homo sapiens
ccttctgccgctgagggcgccgctgg

SEQ ID NO: 111181 - DNA, 26 bp, Homo sapiens
cttctgccgctgagggcgccgctggg

SEQ ID NO: 111182 - DNA, 26 bp, Homo sapiens
ttctgccgctgagggcgccgctgggc

SEQ ID NO: 111183 - DNA, 26 bp, Homo sapiens
tctgccgctgagggcgccgctgggcc

SEQ ID NO: 111184 - DNA, 26 bp, Homo sapiens
ctgccgctgagggcgccgctgggcct

SEQ ID NO: 111185 - DNA, 26 bp, Homo sapiens
tgccgctgagggcgccgctgggcctg

SEQ ID NO: 111186 - DNA, 26 bp, Homo sapiens
gccgctgagggcgccgctgggcctgg

SEQ ID NO: 111187 - DNA, 26 bp, Homo sapiens
ccgctgagggcgccgctgggcctggc

SEQ ID NO: 111188 - DNA, 26 bp, Homo sapiens
cgctgagggcgccgctgggcctggcg

SEQ ID NO: 111189 - DNA, 26 bp, Homo sapiens
gctgagggcgccgctgggcctggcgc

SEQ ID NO: 111190 - DNA, 26 bp, Homo sapiens
ctgagggcgccgctgggcctggcgca

SEQ ID NO: 111191 - DNA, 26 bp, Homo sapiens
tgagggcgccgctgggcctggcgcaa

SEQ ID NO: 111192 - DNA, 26 bp, Homo sapiens
gagggcgccgctgggcctggcgcaac

SEQ ID NO: 111193 - DNA, 26 bp, Homo sapiens
agggcgccgctgggcctggcgcaacc

SEQ ID NO: 111194 - DNA, 26 bp, Homo sapiens
gggcgccgctgggcctggcgcaacct

SEQ ID NO: 111195 - DNA, 26 bp, Homo sapiens
ggcgccgctgggcctggcgcaacctg

SEQ ID NO: 111196 - DNA, 26 bp, Homo sapiens
gcgccgctgggcctggcgcaacctgt

SEQ ID NO: 111197 - DNA, 26 bp, Homo sapiens
cgccgctgggcctggcgcaacctgtg

SEQ ID NO: 111198 - DNA, 26 bp, Homo sapiens
gccgctgggcctggcgcaacctgtgc

SEQ ID NO: 111199 - DNA, 26 bp, Homo sapiens
ccgctgggcctggcgcaacctgtgca

SEQ ID NO: 111200 - DNA, 26 bp, Homo sapiens
cgctgggcctggcgcaacctgtgcac

SEQ ID NO: 111201 - DNA, 26 bp, Homo sapiens
gctgggcctggcgcaacctgtgcact

SEQ ID NO: 111202 - DNA, 26 bp, Homo sapiens
ctgggcctggcgcaacctgtgcacta

SEQ ID NO: 111203 - DNA, 26 bp, Homo sapiens
tgggcctggcgcaacctgtgcactac

SEQ ID NO: 111204 - DNA, 26 bp, Homo sapiens
gggcctggcgcaacctgtgcactacc

SEQ ID NO: 111205 - DNA, 26 bp, Homo sapiens
ggcctggcgcaacctgtgcactaccc

SEQ ID NO: 111206 - DNA, 26 bp, Homo sapiens
gcctggcgcaacctgtgcactacccc

SEQ ID NO: 111207 - DNA, 26 bp, Homo sapiens
cctggcgcaacctgtgcactaccccc

SEQ ID NO: 111208 - DNA, 26 bp, Homo sapiens
ctggcgcaacctgtgcactaccccca

SEQ ID NO: 111209 - DNA, 26 bp, Homo sapiens
tggcgcaacctgtgcactacccccac

SEQ ID NO: 111210 - DNA, 26 bp, Homo sapiens
ggcgcaacctgtgcactacccccacg

SEQ ID NO: 111211 - DNA, 26 bp, Homo sapiens
gcgcaacctgtgcactacccccacgt

SEQ ID NO: 111212 - DNA, 26 bp, Homo sapiens
cgcaacctgtgcactacccccacgta

SEQ ID NO: 111213 - DNA, 26 bp, Homo sapiens
gcaacctgtgcactacccccacgtag

SEQ ID NO: 111214 - DNA, 26 bp, Homo sapiens
caacctgtgcactacccccacgtagc

SEQ ID NO: 111215 - DNA, 26 bp, Homo sapiens
aacctgtgcactacccccacgtagca

SEQ ID NO: 111216 - DNA, 26 bp, Homo sapiens
acctgtgcactacccccacgtagcac

SEQ ID NO: 111217 - DNA, 26 bp, Homo sapiens
cctgtgcactacccccacgtagcacc

SEQ ID NO: 111218 - DNA, 26 bp, Homo sapiens
ctgtgcactacccccacgtagcacca

SEQ ID NO: 111219 - DNA, 26 bp, Homo sapiens
tgtgcactacccccacgtagcaccag

SEQ ID NO: 111220 - DNA, 26 bp, Homo sapiens
gtgcactacccccacgtagcaccagc

SEQ ID NO: 111221 - DNA, 26 bp, Homo sapiens
tgcactacccccacgtagcaccagcc

SEQ ID NO: 111222 - DNA, 26 bp, Homo sapiens
gcactacccccacgtagcaccagccc

SEQ ID NO: 111223 - DNA, 26 bp, Homo sapiens
cactacccccacgtagcaccagccca

SEQ ID NO: 111224 - DNA, 26 bp, Homo sapiens
actacccccacgtagcaccagcccat

SEQ ID NO: 111225 - DNA, 26 bp, Homo sapiens
ctacccccacgtagcaccagcccatc

SEQ ID NO: 111226 - DNA, 26 bp, Homo sapiens
tacccccacgtagcaccagcccatca

SEQ ID NO: 111227 - DNA, 26 bp, Homo sapiens
acccccacgtagcaccagcccatcac

SEQ ID NO: 111228 - DNA, 26 bp, Homo sapiens
cccccacgtagcaccagcccatcacc

SEQ ID NO: 111229 - DNA, 26 bp, Homo sapiens
ccccacgtagcaccagcccatcacca

SEQ ID NO: 111230 - DNA, 26 bp, Homo sapiens
cccacgtagcaccagcccatcaccag

SEQ ID NO: 111231 - DNA, 26 bp, Homo sapiens
ccacgtagcaccagcccatcaccagc

SEQ ID NO: 111232 - DNA, 26 bp, Homo sapiens
cacgtagcaccagcccatcaccagca

SEQ ID NO: 111233 - DNA, 26 bp, Homo sapiens
acgtagcaccagcccatcaccagcat

SEQ ID NO: 111234 - DNA, 26 bp, Homo sapiens
cgtagcaccagcccatcaccagcatg

SEQ ID NO: 111235 - DNA, 26 bp, Homo sapiens
gtagcaccagcccatcaccagcatgg

SEQ ID NO: 111236 - DNA, 26 bp, Homo sapiens
tagcaccagcccatcaccagcatggg

SEQ ID NO: 111237 - DNA, 26 bp, Homo sapiens
agcaccagcccatcaccagcatgggc

SEQ ID NO: 111238 - DNA, 26 bp, Homo sapiens
gcaccagcccatcaccagcatgggca

SEQ ID NO: 111239 - DNA, 26 bp, Homo sapiens
caccagcccatcaccagcatgggcag

SEQ ID NO: 111240 - DNA, 26 bp, Homo sapiens
accagcccatcaccagcatgggcagc

SEQ ID NO: 111241 - DNA, 26 bp, Homo sapiens
ccagcccatcaccagcatgggcagca

SEQ ID NO: 111242 - DNA, 26 bp, Homo sapiens
cagcccatcaccagcatgggcagcag

SEQ ID NO: 111243 - DNA, 26 bp, Homo sapiens
agcccatcaccagcatgggcagcagg

SEQ ID NO: 111244 - DNA, 26 bp, Homo sapiens
gcccatcaccagcatgggcagcagga

SEQ ID NO: 111245 - DNA, 26 bp, Homo sapiens
cccatcaccagcatgggcagcaggaa

SEQ ID NO: 111246 - DNA, 26 bp, Homo sapiens
ccatcaccagcatgggcagcaggaat

SEQ ID NO: 111247 - DNA, 26 bp, Homo sapiens
catcaccagcatgggcagcaggaatc

SEQ ID NO: 111248 - DNA, 26 bp, Homo sapiens
atcaccagcatgggcagcaggaatcc

SEQ ID NO: 111249 - DNA, 26 bp, Homo sapiens
tcaccagcatgggcagcaggaatccc

SEQ ID NO: 111250 - DNA, 26 bp, Homo sapiens
caccagcatgggcagcaggaatcccg

SEQ ID NO: 111251 - DNA, 26 bp, Homo sapiens
accagcatgggcagcaggaatcccgc

SEQ ID NO: 111252 - DNA, 26 bp, Homo sapiens
ccagcatgggcagcaggaatcccgcc

SEQ ID NO: 111253 - DNA, 26 bp, Homo sapiens
cagcatgggcagcaggaatcccgcca

SEQ ID NO: 111254 - DNA, 26 bp, Homo sapiens
agcatgggcagcaggaatcccgccac

SEQ ID NO: 111255 - DNA, 26 bp, Homo sapiens
gcatgggcagcaggaatcccgccaca

SEQ ID NO: 111256 - DNA, 26 bp, Homo sapiens
catgggcagcaggaatcccgccacat

SEQ ID NO: 111257 - DNA, 26 bp, Homo sapiens
atgggcagcaggaatcccgccacatg

SEQ ID NO: 111258 - DNA, 26 bp, Homo sapiens
tgggcagcaggaatcccgccacatgg

SEQ ID NO: 111259 - DNA, 26 bp, Homo sapiens
gggcagcaggaatcccgccacatggt

SEQ ID NO: 111260 - DNA, 26 bp, Homo sapiens
ggcagcaggaatcccgccacatggta

SEQ ID NO: 111261 - DNA, 26 bp, Homo sapiens
gcagcaggaatcccgccacatggtag

SEQ ID NO: 111262 - DNA, 26 bp, Homo sapiens
cagcaggaatcccgccacatggtaga

SEQ ID NO: 111263 - DNA, 26 bp, Homo sapiens
agcaggaatcccgccacatggtagag

SEQ ID NO: 111264 - DNA, 26 bp, Homo sapiens
gcaggaatcccgccacatggtagagg

SEQ ID NO: 111265 - DNA, 26 bp, Homo sapiens
caggaatcccgccacatggtagagga

SEQ ID NO: 111266 - DNA, 26 bp, Homo sapiens
aggaatcccgccacatggtagaggaa

SEQ ID NO: 111267 - DNA, 26 bp, Homo sapiens
ggaatcccgccacatggtagaggaat

SEQ ID NO: 111268 - DNA, 26 bp, Homo sapiens
gaatcccgccacatggtagaggaatc

SEQ ID NO: 111269 - DNA, 26 bp, Homo sapiens
aatcccgccacatggtagaggaatcg

SEQ ID NO: 111270 - DNA, 26 bp, Homo sapiens
atcccgccacatggtagaggaatcgg

SEQ ID NO: 111271 - DNA, 26 bp, Homo sapiens
tcccgccacatggtagaggaatcggg

SEQ ID NO: 111272 - DNA, 26 bp, Homo sapiens
cccgccacatggtagaggaatcggga

SEQ ID NO: 111273 - DNA, 26 bp, Homo sapiens
ccgccacatggtagaggaatcgggag

SEQ ID NO: 111274 - DNA, 26 bp, Homo sapiens
cgccacatggtagaggaatcgggagg

SEQ ID NO: 111275 - DNA, 26 bp, Homo sapiens
gccacatggtagaggaatcgggaggt

SEQ ID NO: 111276 - DNA, 26 bp, Homo sapiens
ccacatggtagaggaatcgggaggtg

SEQ ID NO: 111277 - DNA, 26 bp, Homo sapiens
cacatggtagaggaatcgggaggtga

SEQ ID NO: 111278 - DNA, 26 bp, Homo sapiens
acatggtagaggaatcgggaggtgaa

SEQ ID NO: 111279 - DNA, 26 bp, Homo sapiens
catggtagaggaatcgggaggtgaac

SEQ ID NO: 111280 - DNA, 26 bp, Homo sapiens
atggtagaggaatcgggaggtgaacc

SEQ ID NO: 111281 - DNA, 26 bp, Homo sapiens
tggtagaggaatcgggaggtgaacca

SEQ ID NO: 111282 - DNA, 26 bp, Homo sapiens
ggtagaggaatcgggaggtgaaccag

SEQ ID NO: 111283 - DNA, 26 bp, Homo sapiens
gtagaggaatcgggaggtgaaccagg

SEQ ID NO: 111284 - DNA, 26 bp, Homo sapiens
tagaggaatcgggaggtgaaccaggc

SEQ ID NO: 111285 - DNA, 26 bp, Homo sapiens
agaggaatcgggaggtgaaccaggca

SEQ ID NO: 111286 - DNA, 26 bp, Homo sapiens
gaggaatcgggaggtgaaccaggcat

SEQ ID NO: 111287 - DNA, 26 bp, Homo sapiens
aggaatcgggaggtgaaccaggcatg

SEQ ID NO: 111288 - DNA, 26 bp, Homo sapiens
ggaatcgggaggtgaaccaggcatgc

SEQ ID NO: 111289 - DNA, 26 bp, Homo sapiens
gaatcgggaggtgaaccaggcatgcg

SEQ ID NO: 111290 - DNA, 26 bp, Homo sapiens
aatcgggaggtgaaccaggcatgcgt

SEQ ID NO: 111291 - DNA, 26 bp, Homo sapiens
atcgggaggtgaaccaggcatgcgtt

SEQ ID NO: 111292 - DNA, 26 bp, Homo sapiens
tcgggaggtgaaccaggcatgcgttt

SEQ ID NO: 111293 - DNA, 26 bp, Homo sapiens
cgggaggtgaaccaggcatgcgtttc

SEQ ID NO: 111294 - DNA, 26 bp, Homo sapiens
gggaggtgaaccaggcatgcgtttct

SEQ ID NO: 111295 - DNA, 26 bp, Homo sapiens
ggaggtgaaccaggcatgcgtttctg

SEQ ID NO: 111296 - DNA, 26 bp, Homo sapiens
gaggtgaaccaggcatgcgtttctgc

SEQ ID NO: 111297 - DNA, 26 bp, Homo sapiens
aggtgaaccaggcatgcgtttctgct

SEQ ID NO: 111298 - DNA, 26 bp, Homo sapiens
ggtgaaccaggcatgcgtttctgctt

SEQ ID NO: 111299 - DNA, 26 bp, Homo sapiens
gtgaaccaggcatgcgtttctgcttg

SEQ ID NO: 111300 - DNA, 26 bp, Homo sapiens
tgaaccaggcatgcgtttctgcttgg

SEQ ID NO: 111301 - DNA, 26 bp, Homo sapiens
gaaccaggcatgcgtttctgcttggt

SEQ ID NO: 111302 - DNA, 26 bp, Homo sapiens
aaccaggcatgcgtttctgcttggtt

SEQ ID NO: 111303 - DNA, 26 bp, Homo sapiens
accaggcatgcgtttctgcttggttc

SEQ ID NO: 111304 - DNA, 26 bp, Homo sapiens
ccaggcatgcgtttctgcttggttct

SEQ ID NO: 111305 - DNA, 26 bp, Homo sapiens
caggcatgcgtttctgcttggttctc

SEQ ID NO: 111306 - DNA, 26 bp, Homo sapiens
aggcatgcgtttctgcttggttctct

SEQ ID NO: 111307 - DNA, 26 bp, Homo sapiens
ggcatgcgtttctgcttggttctctt

SEQ ID NO: 111308 - DNA, 26 bp, Homo sapiens
gcatgcgtttctgcttggttctcttg

SEQ ID NO: 111309 - DNA, 26 bp, Homo sapiens
catgcgtttctgcttggttctcttgg

SEQ ID NO: 111310 - DNA, 26 bp, Homo sapiens
atgcgtttctgcttggttctcttggg

SEQ ID NO: 111311 - DNA, 26 bp, Homo sapiens
tgcgtttctgcttggttctcttggga

SEQ ID NO: 111312 - DNA, 26 bp, Homo sapiens
gcgtttctgcttggttctcttgggag

SEQ ID NO: 111313 - DNA, 26 bp, Homo sapiens
cgtttctgcttggttctcttgggaga

SEQ ID NO: 111314 - DNA, 26 bp, Homo sapiens
gtttctgcttggttctcttgggagaa

SEQ ID NO: 111315 - DNA, 26 bp, Homo sapiens
tttctgcttggttctcttgggagaag

SEQ ID NO: 111316 - DNA, 26 bp, Homo sapiens
ttctgcttggttctcttgggagaagg

SEQ ID NO: 111317 - DNA, 26 bp, Homo sapiens
tctgcttggttctcttgggagaaggt

SEQ ID NO: 111318 - DNA, 26 bp, Homo sapiens
ctgcttggttctcttgggagaaggtg

SEQ ID NO: 111319 - DNA, 26 bp, Homo sapiens
tgcttggttctcttgggagaaggtgc

SEQ ID NO: 111320 - DNA, 26 bp, Homo sapiens
gcttggttctcttgggagaaggtgca

SEQ ID NO: 111321 - DNA, 26 bp, Homo sapiens
cttggttctcttgggagaaggtgcaa

SEQ ID NO: 111322 - DNA, 26 bp, Homo sapiens
ttggttctcttgggagaaggtgcaac

SEQ ID NO: 111323 - DNA, 26 bp, Homo sapiens
tggttctcttgggagaaggtgcaacg

SEQ ID NO: 111324 - DNA, 26 bp, Homo sapiens
ggttctcttgggagaaggtgcaacgt

SEQ ID NO: 111325 - DNA, 26 bp, Homo sapiens
gttctcttgggagaaggtgcaacgtg

SEQ ID NO: 111326 - DNA, 26 bp, Homo sapiens
ttctcttgggagaaggtgcaacgtgg

SEQ ID NO: 111327 - DNA, 26 bp, Homo sapiens
tctcttgggagaaggtgcaacgtggc

SEQ ID NO: 111328 - DNA, 26 bp, Homo sapiens
ctcttgggagaaggtgcaacgtggca

SEQ ID NO: 111329 - DNA, 26 bp, Homo sapiens
tcttgggagaaggtgcaacgtggcag

SEQ ID NO: 111330 - DNA, 26 bp, Homo sapiens
cttgggagaaggtgcaacgtggcagg

SEQ ID NO: 111331 - DNA, 26 bp, Homo sapiens
ttgggagaaggtgcaacgtggcaggg

SEQ ID NO: 111332 - DNA, 26 bp, Homo sapiens
tgggagaaggtgcaacgtggcaggga

SEQ ID NO: 111333 - DNA, 26 bp, Homo sapiens
gggagaaggtgcaacgtggcagggag

SEQ ID NO: 111334 - DNA, 26 bp, Homo sapiens
ggagaaggtgcaacgtggcagggagt

SEQ ID NO: 111335 - DNA, 26 bp, Homo sapiens
gagaaggtgcaacgtggcagggagtt

SEQ ID NO: 111336 - DNA, 26 bp, Homo sapiens
agaaggtgcaacgtggcagggagttg

SEQ ID NO: 111337 - DNA, 26 bp, Homo sapiens
gaaggtgcaacgtggcagggagttgt

SEQ ID NO: 111338 - DNA, 26 bp, Homo sapiens
aaggtgcaacgtggcagggagttgtt

SEQ ID NO: 111339 - DNA, 26 bp, Homo sapiens
aggtgcaacgtggcagggagttgttg

SEQ ID NO: 111340 - DNA, 26 bp, Homo sapiens
ggtgcaacgtggcagggagttgttgt

SEQ ID NO: 111341 - DNA, 26 bp, Homo sapiens
gtgcaacgtggcagggagttgttgtg

SEQ ID NO: 111342 - DNA, 26 bp, Homo sapiens
tgcaacgtggcagggagttgttgtga

SEQ ID NO: 111343 - DNA, 26 bp, Homo sapiens
gcaacgtggcagggagttgttgtgat

SEQ ID NO: 111344 - DNA, 26 bp, Homo sapiens
caacgtggcagggagttgttgtgatg

SEQ ID NO: 111345 - DNA, 26 bp, Homo sapiens
aacgtggcagggagttgttgtgatgg

SEQ ID NO: 111346 - DNA, 26 bp, Homo sapiens
acgtggcagggagttgttgtgatggc

SEQ ID NO: 111347 - DNA, 26 bp, Homo sapiens
cgtggcagggagttgttgtgatggcc

SEQ ID NO: 111348 - DNA, 26 bp, Homo sapiens
gtggcagggagttgttgtgatggcct

SEQ ID NO: 111349 - DNA, 26 bp, Homo sapiens
tggcagggagttgttgtgatggcctt

SEQ ID NO: 111350 - DNA, 26 bp, Homo sapiens
ggcagggagttgttgtgatggccttg

SEQ ID NO: 111351 - DNA, 26 bp, Homo sapiens
gcagggagttgttgtgatggccttgg

SEQ ID NO: 111352 - DNA, 26 bp, Homo sapiens
cagggagttgttgtgatggccttggc

SEQ ID NO: 111353 - DNA, 26 bp, Homo sapiens
agggagttgttgtgatggccttggct

SEQ ID NO: 111354 - DNA, 26 bp, Homo sapiens
gggagttgttgtgatggccttggctg

SEQ ID NO: 111355 - DNA, 26 bp, Homo sapiens
ggagttgttgtgatggccttggctga

SEQ ID NO: 111356 - DNA, 26 bp, Homo sapiens
gagttgttgtgatggccttggctgac

SEQ ID NO: 111357 - DNA, 26 bp, Homo sapiens
agttgttgtgatggccttggctgact

SEQ ID NO: 111358 - DNA, 26 bp, Homo sapiens
gttgttgtgatggccttggctgactt

SEQ ID NO: 111359 - DNA, 26 bp, Homo sapiens
ttgttgtgatggccttggctgacttt

SEQ ID NO: 111360 - DNA, 26 bp, Homo sapiens
tgttgtgatggccttggctgactttg

SEQ ID NO: 111361 - DNA, 26 bp, Homo sapiens
gttgtgatggccttggctgactttgg

SEQ ID NO: 111362 - DNA, 26 bp, Homo sapiens
ttgtgatggccttggctgactttggc

SEQ ID NO: 111363 - DNA, 26 bp, Homo sapiens
tgtgatggccttggctgactttggcg

SEQ ID NO: 111364 - DNA, 26 bp, Homo sapiens
gtgatggccttggctgactttggcga

SEQ ID NO: 111365 - DNA, 26 bp, Homo sapiens
tgatggccttggctgactttggcgaa

SEQ ID NO: 111366 - DNA, 26 bp, Homo sapiens
gatggccttggctgactttggcgaag

SEQ ID NO: 111367 - DNA, 26 bp, Homo sapiens
atggccttggctgactttggcgaaga

SEQ ID NO: 111368 - DNA, 26 bp, Homo sapiens
tggccttggctgactttggcgaagag

SEQ ID NO: 111369 - DNA, 26 bp, Homo sapiens
ggccttggctgactttggcgaagaga

SEQ ID NO: 111370 - DNA, 26 bp, Homo sapiens
gccttggctgactttggcgaagagaa

SEQ ID NO: 111371 - DNA, 26 bp, Homo sapiens
ccttggctgactttggcgaagagaat

SEQ ID NO: 111372 - DNA, 26 bp, Homo sapiens
cttggctgactttggcgaagagaatc

SEQ ID NO: 111373 - DNA, 26 bp, Homo sapiens
ttggctgactttggcgaagagaatct

SEQ ID NO: 111374 - DNA, 26 bp, Homo sapiens
tggctgactttggcgaagagaatctc

SEQ ID NO: 111375 - DNA, 26 bp, Homo sapiens
ggctgactttggcgaagagaatctct

SEQ ID NO: 111376 - DNA, 26 bp, Homo sapiens
gctgactttggcgaagagaatctctg

SEQ ID NO: 111377 - DNA, 26 bp, Homo sapiens
ctgactttggcgaagagaatctctgg

SEQ ID NO: 111378 - DNA, 26 bp, Homo sapiens
tgactttggcgaagagaatctctggc

SEQ ID NO: 111379 - DNA, 26 bp, Homo sapiens
gactttggcgaagagaatctctggca

SEQ ID NO: 111380 - DNA, 26 bp, Homo sapiens
actttggcgaagagaatctctggcaa

SEQ ID NO: 111381 - DNA, 26 bp, Homo sapiens
ctttggcgaagagaatctctggcaag

SEQ ID NO: 111382 - DNA, 26 bp, Homo sapiens
tttggcgaagagaatctctggcaagg

SEQ ID NO: 111383 - DNA, 26 bp, Homo sapiens
ttggcgaagagaatctctggcaaggc

SEQ ID NO: 111384 - DNA, 26 bp, Homo sapiens
tggcgaagagaatctctggcaaggca

SEQ ID NO: 111385 - DNA, 26 bp, Homo sapiens
ggcgaagagaatctctggcaaggcaa

SEQ ID NO: 111386 - DNA, 26 bp, Homo sapiens
gcgaagagaatctctggcaaggcaag

SEQ ID NO: 111387 - DNA, 26 bp, Homo sapiens
cgaagagaatctctggcaaggcaagg

SEQ ID NO: 111388 - DNA, 26 bp, Homo sapiens
gaagagaatctctggcaaggcaagga

SEQ ID NO: 111389 - DNA, 26 bp, Homo sapiens
aagagaatctctggcaaggcaaggag

SEQ ID NO: 111390 - DNA, 26 bp, Homo sapiens
agagaatctctggcaaggcaaggagg

SEQ ID NO: 111391 - DNA, 26 bp, Homo sapiens
gagaatctctggcaaggcaaggagga

SEQ ID NO: 111392 - DNA, 26 bp, Homo sapiens
agaatctctggcaaggcaaggaggaa

SEQ ID NO: 111393 - DNA, 26 bp, Homo sapiens
gaatctctggcaaggcaaggaggaag

SEQ ID NO: 111394 - DNA, 26 bp, Homo sapiens
aatctctggcaaggcaaggaggaagc

SEQ ID NO: 111395 - DNA, 26 bp, Homo sapiens
atctctggcaaggcaaggaggaagcc

SEQ ID NO: 111396 - DNA, 26 bp, Homo sapiens
tctctggcaaggcaaggaggaagccc

SEQ ID NO: 111397 - DNA, 26 bp, Homo sapiens
ctctggcaaggcaaggaggaagccca

SEQ ID NO: 111398 - DNA, 26 bp, Homo sapiens
tctggcaaggcaaggaggaagcccac

SEQ ID NO: 111399 - DNA, 26 bp, Homo sapiens
ctggcaaggcaaggaggaagcccacc

SEQ ID NO: 111400 - DNA, 26 bp, Homo sapiens
tggcaaggcaaggaggaagcccacca

SEQ ID NO: 111401 - DNA, 26 bp, Homo sapiens
ggcaaggcaaggaggaagcccaccag

SEQ ID NO: 111402 - DNA, 26 bp, Homo sapiens
gcaaggcaaggaggaagcccaccagc

SEQ ID NO: 111403 - DNA, 26 bp, Homo sapiens
caaggcaaggaggaagcccaccagcc

SEQ ID NO: 111404 - DNA, 26 bp, Homo sapiens
aaggcaaggaggaagcccaccagcca

SEQ ID NO: 111405 - DNA, 26 bp, Homo sapiens
aggcaaggaggaagcccaccagccag

SEQ ID NO: 111406 - DNA, 26 bp, Homo sapiens
ggcaaggaggaagcccaccagccaga

SEQ ID NO: 111407 - DNA, 26 bp, Homo sapiens
gcaaggaggaagcccaccagccagat

SEQ ID NO: 111408 - DNA, 26 bp, Homo sapiens
caaggaggaagcccaccagccagatg

SEQ ID NO: 111409 - DNA, 26 bp, Homo sapiens
aaggaggaagcccaccagccagatgg

SEQ ID NO: 111410 - DNA, 26 bp, Homo sapiens
aggaggaagcccaccagccagatggt

SEQ ID NO: 111411 - DNA, 26 bp, Homo sapiens
ggaggaagcccaccagccagatggtc

SEQ ID NO: 111412 - DNA, 26 bp, Homo sapiens
gaggaagcccaccagccagatggtcc

SEQ ID NO: 111413 - DNA, 26 bp, Homo sapiens
aggaagcccaccagccagatggtccc

SEQ ID NO: 111414 - DNA, 26 bp, Homo sapiens
ggaagcccaccagccagatggtccca

SEQ ID NO: 111415 - DNA, 26 bp, Homo sapiens
gaagcccaccagccagatggtcccac

SEQ ID NO: 111416 - DNA, 26 bp, Homo sapiens
aagcccaccagccagatggtcccaca

SEQ ID NO: 111417 - DNA, 26 bp, Homo sapiens
agcccaccagccagatggtcccacag

SEQ ID NO: 111418 - DNA, 26 bp, Homo sapiens
gcccaccagccagatggtcccacagg

SEQ ID NO: 111419 - DNA, 26 bp, Homo sapiens
cccaccagccagatggtcccacaggt

SEQ ID NO: 111420 - DNA, 26 bp, Homo sapiens
ccaccagccagatggtcccacaggtg

SEQ ID NO: 111421 - DNA, 26 bp, Homo sapiens
caccagccagatggtcccacaggtga

SEQ ID NO: 111422 - DNA, 26 bp, Homo sapiens
accagccagatggtcccacaggtgat

SEQ ID NO: 111423 - DNA, 26 bp, Homo sapiens
ccagccagatggtcccacaggtgatg

SEQ ID NO: 111424 - DNA, 26 bp, Homo sapiens
cagccagatggtcccacaggtgatgt

SEQ ID NO: 111425 - DNA, 26 bp, Homo sapiens
agccagatggtcccacaggtgatgtg

SEQ ID NO: 111426 - DNA, 26 bp, Homo sapiens
gccagatggtcccacaggtgatgtgg

SEQ ID NO: 111427 - DNA, 26 bp, Homo sapiens
ccagatggtcccacaggtgatgtgga

SEQ ID NO: 111428 - DNA, 26 bp, Homo sapiens
cagatggtcccacaggtgatgtggat

SEQ ID NO: 111429 - DNA, 26 bp, Homo sapiens
agatggtcccacaggtgatgtggatg

SEQ ID NO: 111430 - DNA, 26 bp, Homo sapiens
gatggtcccacaggtgatgtggatgg

SEQ ID NO: 111431 - DNA, 26 bp, Homo sapiens
atggtcccacaggtgatgtggatgga

SEQ ID NO: 111432 - DNA, 26 bp, Homo sapiens
tggtcccacaggtgatgtggatggag

SEQ ID NO: 111433 - DNA, 26 bp, Homo sapiens
ggtcccacaggtgatgtggatggaga

SEQ ID NO: 111434 - DNA, 26 bp, Homo sapiens
gtcccacaggtgatgtggatggagag

SEQ ID NO: 111435 - DNA, 26 bp, Homo sapiens
tcccacaggtgatgtggatggagagg

SEQ ID NO: 111436 - DNA, 26 bp, Homo sapiens
cccacaggtgatgtggatggagagga

SEQ ID NO: 111437 - DNA, 26 bp, Homo sapiens
ccacaggtgatgtggatggagaggag

SEQ ID NO: 111438 - DNA, 26 bp, Homo sapiens
cacaggtgatgtggatggagaggagg

SEQ ID NO: 111439 - DNA, 26 bp, Homo sapiens
acaggtgatgtggatggagaggaggc

SEQ ID NO: 111440 - DNA, 26 bp, Homo sapiens
caggtgatgtggatggagaggaggcg

SEQ ID NO: 111441 - DNA, 26 bp, Homo sapiens
aggtgatgtggatggagaggaggcgg

SEQ ID NO: 111442 - DNA, 26 bp, Homo sapiens
ggtgatgtggatggagaggaggcggc

SEQ ID NO: 111443 - DNA, 26 bp, Homo sapiens
gtgatgtggatggagaggaggcggcg

SEQ ID NO: 111444 - DNA, 26 bp, Homo sapiens
tgatgtggatggagaggaggcggcgg

SEQ ID NO: 111445 - DNA, 26 bp, Homo sapiens
gatgtggatggagaggaggcggcggt

SEQ ID NO: 111446 - DNA, 26 bp, Homo sapiens
atgtggatggagaggaggcggcggtg

SEQ ID NO: 111447 - DNA, 26 bp, Homo sapiens
tgtggatggagaggaggcggcggtgg

SEQ ID NO: 111448 - DNA, 26 bp, Homo sapiens
gtggatggagaggaggcggcggtggc

SEQ ID NO: 111449 - DNA, 26 bp, Homo sapiens
tggatggagaggaggcggcggtggcg

SEQ ID NO: 111450 - DNA, 26 bp, Homo sapiens
ggatggagaggaggcggcggtggcgg

SEQ ID NO: 111451 - DNA, 26 bp, Homo sapiens
gatggagaggaggcggcggtggcggt

SEQ ID NO: 111452 - DNA, 26 bp, Homo sapiens
atggagaggaggcggcggtggcggta

SEQ ID NO: 111453 - DNA, 26 bp, Homo sapiens
tggagaggaggcggcggtggcggtag

SEQ ID NO: 111454 - DNA, 26 bp, Homo sapiens
ggagaggaggcggcggtggcggtagg

SEQ ID NO: 111455 - DNA, 26 bp, Homo sapiens
gagaggaggcggcggtggcggtaggc

SEQ ID NO: 111456 - DNA, 26 bp, Homo sapiens
agaggaggcggcggtggcggtaggca

SEQ ID NO: 111457 - DNA, 26 bp, Homo sapiens
gaggaggcggcggtggcggtaggcat

SEQ ID NO: 111458 - DNA, 26 bp, Homo sapiens
aggaggcggcggtggcggtaggcatg

SEQ ID NO: 111459 - DNA, 26 bp, Homo sapiens
ggaggcggcggtggcggtaggcatgg

SEQ ID NO: 111460 - DNA, 26 bp, Homo sapiens
gaggcggcggtggcggtaggcatgga

SEQ ID NO: 111461 - DNA, 26 bp, Homo sapiens
aggcggcggtggcggtaggcatggac

SEQ ID NO: 111462 - DNA, 26 bp, Homo sapiens
ggcggcggtggcggtaggcatggacg

SEQ ID NO: 111463 - DNA, 26 bp, Homo sapiens
gcggcggtggcggtaggcatggacgg

SEQ ID NO: 111464 - DNA, 26 bp, Homo sapiens
cggcggtggcggtaggcatggacggc

SEQ ID NO: 111465 - DNA, 26 bp, Homo sapiens
ggcggtggcggtaggcatggacggcg

SEQ ID NO: 111466 - DNA, 26 bp, Homo sapiens
gcggtggcggtaggcatggacggcgt

SEQ ID NO: 111467 - DNA, 26 bp, Homo sapiens
cggtggcggtaggcatggacggcgtg

SEQ ID NO: 111468 - DNA, 26 bp, Homo sapiens
ggtggcggtaggcatggacggcgtgg

SEQ ID NO: 111469 - DNA, 26 bp, Homo sapiens
gtggcggtaggcatggacggcgtgga

SEQ ID NO: 111470 - DNA, 26 bp, Homo sapiens
tggcggtaggcatggacggcgtggac

SEQ ID NO: 111471 - DNA, 26 bp, Homo sapiens
ggcggtaggcatggacggcgtggaca

SEQ ID NO: 111472 - DNA, 26 bp, Homo sapiens
gcggtaggcatggacggcgtggacaa

SEQ ID NO: 111473 - DNA, 26 bp, Homo sapiens
cggtaggcatggacggcgtggacaat

SEQ ID NO: 111474 - DNA, 26 bp, Homo sapiens
ggtaggcatggacggcgtggacaatg

SEQ ID NO: 111475 - DNA, 26 bp, Homo sapiens
gtaggcatggacggcgtggacaatgg

SEQ ID NO: 111476 - DNA, 26 bp, Homo sapiens
taggcatggacggcgtggacaatggc

SEQ ID NO: 111477 - DNA, 26 bp, Homo sapiens
aggcatggacggcgtggacaatggcc

SEQ ID NO: 111478 - DNA, 26 bp, Homo sapiens
ggcatggacggcgtggacaatggcca

SEQ ID NO: 111479 - DNA, 26 bp, Homo sapiens
gcatggacggcgtggacaatggccag

SEQ ID NO: 111480 - DNA, 26 bp, Homo sapiens
catggacggcgtggacaatggccagg

SEQ ID NO: 111481 - DNA, 26 bp, Homo sapiens
atggacggcgtggacaatggccaggt

SEQ ID NO: 111482 - DNA, 26 bp, Homo sapiens
tggacggcgtggacaatggccaggta

SEQ ID NO: 111483 - DNA, 26 bp, Homo sapiens
ggacggcgtggacaatggccaggtag

SEQ ID NO: 111484 - DNA, 26 bp, Homo sapiens
gacggcgtggacaatggccaggtagc

SEQ ID NO: 111485 - DNA, 26 bp, Homo sapiens
acggcgtggacaatggccaggtagcg

SEQ ID NO: 111486 - DNA, 26 bp, Homo sapiens
cggcgtggacaatggccaggtagcgg

SEQ ID NO: 111487 - DNA, 26 bp, Homo sapiens
ggcgtggacaatggccaggtagcggt

SEQ ID NO: 111488 - DNA, 26 bp, Homo sapiens
gcgtggacaatggccaggtagcggtc

SEQ ID NO: 111489 - DNA, 26 bp, Homo sapiens
cgtggacaatggccaggtagcggtcc

SEQ ID NO: 111490 - DNA, 26 bp, Homo sapiens
gtggacaatggccaggtagcggtcca

SEQ ID NO: 111491 - DNA, 26 bp, Homo sapiens
tggacaatggccaggtagcggtccac

SEQ ID NO: 111492 - DNA, 26 bp, Homo sapiens
ggacaatggccaggtagcggtccacg

SEQ ID NO: 111493 - DNA, 26 bp, Homo sapiens
gacaatggccaggtagcggtccacgg

SEQ ID NO: 111494 - DNA, 26 bp, Homo sapiens
acaatggccaggtagcggtccacggc

SEQ ID NO: 111495 - DNA, 26 bp, Homo sapiens
caatggccaggtagcggtccacggcg

SEQ ID NO: 111496 - DNA, 26 bp, Homo sapiens
aatggccaggtagcggtccacggcga

SEQ ID NO: 111497 - DNA, 26 bp, Homo sapiens
atggccaggtagcggtccacggcgat

SEQ ID NO: 111498 - DNA, 26 bp, Homo sapiens
tggccaggtagcggtccacggcgatg

SEQ ID NO: 111499 - DNA, 26 bp, Homo sapiens
ggccaggtagcggtccacggcgatgc

SEQ ID NO: 111500 - DNA, 26 bp, Homo sapiens
gccaggtagcggtccacggcgatgca

SEQ ID NO: 111501 - DNA, 26 bp, Homo sapiens
ccaggtagcggtccacggcgatgcag

SEQ ID NO: 111502 - DNA, 26 bp, Homo sapiens
caggtagcggtccacggcgatgcagg

SEQ ID NO: 111503 - DNA, 26 bp, Homo sapiens
aggtagcggtccacggcgatgcaggc

SEQ ID NO: 111504 - DNA, 26 bp, Homo sapiens
ggtagcggtccacggcgatgcaggcc

SEQ ID NO: 111505 - DNA, 26 bp, Homo sapiens
gtagcggtccacggcgatgcaggcca

SEQ ID NO: 111506 - DNA, 26 bp, Homo sapiens
tagcggtccacggcgatgcaggccag

SEQ ID NO: 111507 - DNA, 26 bp, Homo sapiens
agcggtccacggcgatgcaggccagg

SEQ ID NO: 111508 - DNA, 26 bp, Homo sapiens
gcggtccacggcgatgcaggccagga

SEQ ID NO: 111509 - DNA, 26 bp, Homo sapiens
cggtccacggcgatgcaggccaggag

SEQ ID NO: 111510 - DNA, 26 bp, Homo sapiens
ggtccacggcgatgcaggccaggagc

SEQ ID NO: 111511 - DNA, 26 bp, Homo sapiens
gtccacggcgatgcaggccaggagca

SEQ ID NO: 111512 - DNA, 26 bp, Homo sapiens
tccacggcgatgcaggccaggagcag

SEQ ID NO: 111513 - DNA, 26 bp, Homo sapiens
ccacggcgatgcaggccaggagcagg

SEQ ID NO: 111514 - DNA, 26 bp, Homo sapiens
cacggcgatgcaggccaggagcaggc

SEQ ID NO: 111515 - DNA, 26 bp, Homo sapiens
acggcgatgcaggccaggagcaggct

SEQ ID NO: 111516 - DNA, 26 bp, Homo sapiens
cggcgatgcaggccaggagcaggctg

SEQ ID NO: 111517 - DNA, 26 bp, Homo sapiens
ggcgatgcaggccaggagcaggctgc

SEQ ID NO: 111518 - DNA, 26 bp, Homo sapiens
gcgatgcaggccaggagcaggctgct

SEQ ID NO: 111519 - DNA, 26 bp, Homo sapiens
cgatgcaggccaggagcaggctgctg

SEQ ID NO: 111520 - DNA, 26 bp, Homo sapiens
gatgcaggccaggagcaggctgctgc

SEQ ID NO: 111521 - DNA, 26 bp, Homo sapiens
atgcaggccaggagcaggctgctgca

SEQ ID NO: 111522 - DNA, 26 bp, Homo sapiens
tgcaggccaggagcaggctgctgcag

SEQ ID NO: 111523 - DNA, 26 bp, Homo sapiens
gcaggccaggagcaggctgctgcagt

SEQ ID NO: 111524 - DNA, 26 bp, Homo sapiens
caggccaggagcaggctgctgcagta

SEQ ID NO: 111525 - DNA, 26 bp, Homo sapiens
aggccaggagcaggctgctgcagtag

SEQ ID NO: 111526 - DNA, 26 bp, Homo sapiens
ggccaggagcaggctgctgcagtaga

SEQ ID NO: 111527 - DNA, 26 bp, Homo sapiens
gccaggagcaggctgctgcagtagaa

SEQ ID NO: 111528 - DNA, 26 bp, Homo sapiens
ccaggagcaggctgctgcagtagaag

SEQ ID NO: 111529 - DNA, 26 bp, Homo sapiens
caggagcaggctgctgcagtagaagt

SEQ ID NO: 111530 - DNA, 26 bp, Homo sapiens
aggagcaggctgctgcagtagaagtt

SEQ ID NO: 111531 - DNA, 26 bp, Homo sapiens
ggagcaggctgctgcagtagaagttg

SEQ ID NO: 111532 - DNA, 26 bp, Homo sapiens
gagcaggctgctgcagtagaagttga

SEQ ID NO: 111533 - DNA, 26 bp, Homo sapiens
agcaggctgctgcagtagaagttgac

SEQ ID NO: 111534 - DNA, 26 bp, Homo sapiens
gcaggctgctgcagtagaagttgact

SEQ ID NO: 111535 - DNA, 26 bp, Homo sapiens
caggctgctgcagtagaagttgactt

SEQ ID NO: 111536 - DNA, 26 bp, Homo sapiens
aggctgctgcagtagaagttgacttt

SEQ ID NO: 111537 - DNA, 26 bp, Homo sapiens
ggctgctgcagtagaagttgactttg

SEQ ID NO: 111538 - DNA, 26 bp, Homo sapiens
gctgctgcagtagaagttgactttgt

SEQ ID NO: 111539 - DNA, 26 bp, Homo sapiens
ctgctgcagtagaagttgactttgtg

SEQ ID NO: 111540 - DNA, 26 bp, Homo sapiens
tgctgcagtagaagttgactttgtgc

SEQ ID NO: 111541 - DNA, 26 bp, Homo sapiens
gctgcagtagaagttgactttgtgca

SEQ ID NO: 111542 - DNA, 26 bp, Homo sapiens
ctgcagtagaagttgactttgtgcag

SEQ ID NO: 111543 - DNA, 26 bp, Homo sapiens
tgcagtagaagttgactttgtgcagg

SEQ ID NO: 111544 - DNA, 26 bp, Homo sapiens
gcagtagaagttgactttgtgcaggg

SEQ ID NO: 111545 - DNA, 26 bp, Homo sapiens
cagtagaagttgactttgtgcagggc

SEQ ID NO: 111546 - DNA, 26 bp, Homo sapiens
agtagaagttgactttgtgcagggca

SEQ ID NO: 111547 - DNA, 26 bp, Homo sapiens
gtagaagttgactttgtgcagggcaa

SEQ ID NO: 111548 - DNA, 26 bp, Homo sapiens
tagaagttgactttgtgcagggcaat

SEQ ID NO: 111549 - DNA, 26 bp, Homo sapiens
agaagttgactttgtgcagggcaatc

SEQ ID NO: 111550 - DNA, 26 bp, Homo sapiens
gaagttgactttgtgcagggcaatca

SEQ ID NO: 111551 - DNA, 26 bp, Homo sapiens
aagttgactttgtgcagggcaatcac

SEQ ID NO: 111552 - DNA, 26 bp, Homo sapiens
agttgactttgtgcagggcaatcaca

SEQ ID NO: 111553 - DNA, 26 bp, Homo sapiens
gttgactttgtgcagggcaatcacag

SEQ ID NO: 111554 - DNA, 26 bp, Homo sapiens
ttgactttgtgcagggcaatcacagt

SEQ ID NO: 111555 - DNA, 26 bp, Homo sapiens
tgactttgtgcagggcaatcacagtt

SEQ ID NO: 111556 - DNA, 26 bp, Homo sapiens
gactttgtgcagggcaatcacagttt

SEQ ID NO: 111557 - DNA, 26 bp, Homo sapiens
actttgtgcagggcaatcacagtttt

SEQ ID NO: 111558 - DNA, 26 bp, Homo sapiens
ctttgtgcagggcaatcacagttttg

SEQ ID NO: 111559 - DNA, 26 bp, Homo sapiens
tttgtgcagggcaatcacagttttgc

SEQ ID NO: 111560 - DNA, 26 bp, Homo sapiens
ttgtgcagggcaatcacagttttgca

SEQ ID NO: 111561 - DNA, 26 bp, Homo sapiens
tgtgcagggcaatcacagttttgcag

SEQ ID NO: 111562 - DNA, 26 bp, Homo sapiens
gtgcagggcaatcacagttttgcaga

SEQ ID NO: 111563 - DNA, 26 bp, Homo sapiens
tgcagggcaatcacagttttgcagag

SEQ ID NO: 111564 - DNA, 26 bp, Homo sapiens
gcagggcaatcacagttttgcagagg

SEQ ID NO: 111565 - DNA, 26 bp, Homo sapiens
cagggcaatcacagttttgcagagga

SEQ ID NO: 111566 - DNA, 26 bp, Homo sapiens
agggcaatcacagttttgcagaggaa

SEQ ID NO: 111567 - DNA, 26 bp, Homo sapiens
gggcaatcacagttttgcagaggaag

SEQ ID NO: 111568 - DNA, 26 bp, Homo sapiens
ggcaatcacagttttgcagaggaagg

SEQ ID NO: 111569 - DNA, 26 bp, Homo sapiens
gcaatcacagttttgcagaggaaggt

SEQ ID NO: 111570 - DNA, 26 bp, Homo sapiens
caatcacagttttgcagaggaaggtc

SEQ ID NO: 111571 - DNA, 26 bp, Homo sapiens
aatcacagttttgcagaggaaggtcc

SEQ ID NO: 111572 - DNA, 26 bp, Homo sapiens
atcacagttttgcagaggaaggtccc

SEQ ID NO: 111573 - DNA, 26 bp, Homo sapiens
tcacagttttgcagaggaaggtcccc

SEQ ID NO: 111574 - DNA, 26 bp, Homo sapiens
cacagttttgcagaggaaggtcccca

SEQ ID NO: 111575 - DNA, 26 bp, Homo sapiens
acagttttgcagaggaaggtccccag

SEQ ID NO: 111576 - DNA, 26 bp, Homo sapiens
cagttttgcagaggaaggtccccagg

SEQ ID NO: 111577 - DNA, 26 bp, Homo sapiens
agttttgcagaggaaggtccccagga

SEQ ID NO: 111578 - DNA, 26 bp, Homo sapiens
gttttgcagaggaaggtccccaggac

SEQ ID NO: 111579 - DNA, 26 bp, Homo sapiens
ttttgcagaggaaggtccccaggacc

SEQ ID NO: 111580 - DNA, 26 bp, Homo sapiens
tttgcagaggaaggtccccaggaccc

SEQ ID NO: 111581 - DNA, 26 bp, Homo sapiens
ttgcagaggaaggtccccaggaccca

SEQ ID NO: 111582 - DNA, 26 bp, Homo sapiens
tgcagaggaaggtccccaggacccag

SEQ ID NO: 111583 - DNA, 26 bp, Homo sapiens
gcagaggaaggtccccaggacccagc

SEQ ID NO: 111584 - DNA, 26 bp, Homo sapiens
cagaggaaggtccccaggacccagcc

SEQ ID NO: 111585 - DNA, 26 bp, Homo sapiens
agaggaaggtccccaggacccagccc

SEQ ID NO: 111586 - DNA, 26 bp, Homo sapiens
gaggaaggtccccaggacccagccca

SEQ ID NO: 111587 - DNA, 26 bp, Homo sapiens
aggaaggtccccaggacccagcccac

SEQ ID NO: 111588 - DNA, 26 bp, Homo sapiens
ggaaggtccccaggacccagcccaca

SEQ ID NO: 111589 - DNA, 26 bp, Homo sapiens
gaaggtccccaggacccagcccacag

SEQ ID NO: 111590 - DNA, 26 bp, Homo sapiens
aaggtccccaggacccagcccacaga

SEQ ID NO: 111591 - DNA, 26 bp, Homo sapiens
aggtccccaggacccagcccacagag

SEQ ID NO: 111592 - DNA, 26 bp, Homo sapiens
ggtccccaggacccagcccacagagc

SEQ ID NO: 111593 - DNA, 26 bp, Homo sapiens
gtccccaggacccagcccacagagcc

SEQ ID NO: 111594 - DNA, 26 bp, Homo sapiens
tccccaggacccagcccacagagccc

SEQ ID NO: 111595 - DNA, 26 bp, Homo sapiens
ccccaggacccagcccacagagccct

SEQ ID NO: 111596 - DNA, 26 bp, Homo sapiens
cccaggacccagcccacagagccctc

SEQ ID NO: 111597 - DNA, 26 bp, Homo sapiens
ccaggacccagcccacagagccctcg

SEQ ID NO: 111598 - DNA, 26 bp, Homo sapiens
caggacccagcccacagagccctcgg

SEQ ID NO: 111599 - DNA, 26 bp, Homo sapiens
aggacccagcccacagagccctcggc

SEQ ID NO: 111600 - DNA, 26 bp, Homo sapiens
ggacccagcccacagagccctcggcc

SEQ ID NO: 111601 - DNA, 26 bp, Homo sapiens
gacccagcccacagagccctcggcca

SEQ ID NO: 111602 - DNA, 26 bp, Homo sapiens
acccagcccacagagccctcggccac

SEQ ID NO: 111603 - DNA, 26 bp, Homo sapiens
cccagcccacagagccctcggccacg

SEQ ID NO: 111604 - DNA, 26 bp, Homo sapiens
ccagcccacagagccctcggccacgg

SEQ ID NO: 111605 - DNA, 26 bp, Homo sapiens
cagcccacagagccctcggccacggc

SEQ ID NO: 111606 - DNA, 26 bp, Homo sapiens
agcccacagagccctcggccacggca

SEQ ID NO: 111607 - DNA, 26 bp, Homo sapiens
gcccacagagccctcggccacggcaa

SEQ ID NO: 111608 - DNA, 26 bp, Homo sapiens
cccacagagccctcggccacggcaaa

SEQ ID NO: 111609 - DNA, 26 bp, Homo sapiens
ccacagagccctcggccacggcaaag

SEQ ID NO: 111610 - DNA, 26 bp, Homo sapiens
cacagagccctcggccacggcaaagg

SEQ ID NO: 111611 - DNA, 26 bp, Homo sapiens
acagagccctcggccacggcaaaggg

SEQ ID NO: 111612 - DNA, 26 bp, Homo sapiens
cagagccctcggccacggcaaagggc

SEQ ID NO: 111613 - DNA, 26 bp, Homo sapiens
agagccctcggccacggcaaagggca

SEQ ID NO: 111614 - DNA, 26 bp, Homo sapiens
gagccctcggccacggcaaagggcaa

SEQ ID NO: 111615 - DNA, 26 bp, Homo sapiens
agccctcggccacggcaaagggcaag

SEQ ID NO: 111616 - DNA, 26 bp, Homo sapiens
gccctcggccacggcaaagggcaaga

SEQ ID NO: 111617 - DNA, 26 bp, Homo sapiens
ccctcggccacggcaaagggcaagat

SEQ ID NO: 111618 - DNA, 26 bp, Homo sapiens
cctcggccacggcaaagggcaagatg

SEQ ID NO: 111619 - DNA, 26 bp, Homo sapiens
ctcggccacggcaaagggcaagatga

SEQ ID NO: 111620 - DNA, 26 bp, Homo sapiens
tcggccacggcaaagggcaagatgaa

SEQ ID NO: 111621 - DNA, 26 bp, Homo sapiens
cggccacggcaaagggcaagatgaag

SEQ ID NO: 111622 - DNA, 26 bp, Homo sapiens
ggccacggcaaagggcaagatgaaga

SEQ ID NO: 111623 - DNA, 26 bp, Homo sapiens
gccacggcaaagggcaagatgaagac

SEQ ID NO: 111624 - DNA, 26 bp, Homo sapiens
ccacggcaaagggcaagatgaagacc

SEQ ID NO: 111625 - DNA, 26 bp, Homo sapiens
cacggcaaagggcaagatgaagacca

SEQ ID NO: 111626 - DNA, 26 bp, Homo sapiens
acggcaaagggcaagatgaagaccag

SEQ ID NO: 111627 - DNA, 26 bp, Homo sapiens
cggcaaagggcaagatgaagaccagc

SEQ ID NO: 111628 - DNA, 26 bp, Homo sapiens
ggcaaagggcaagatgaagaccagca

SEQ ID NO: 111629 - DNA, 26 bp, Homo sapiens
gcaaagggcaagatgaagaccagcag

SEQ ID NO: 111630 - DNA, 26 bp, Homo sapiens
caaagggcaagatgaagaccagcagg

SEQ ID NO: 111631 - DNA, 26 bp, Homo sapiens
aaagggcaagatgaagaccagcagga

SEQ ID NO: 111632 - DNA, 26 bp, Homo sapiens
aagggcaagatgaagaccagcaggag

SEQ ID NO: 111633 - DNA, 26 bp, Homo sapiens
agggcaagatgaagaccagcaggagg

SEQ ID NO: 111634 - DNA, 26 bp, Homo sapiens
gggcaagatgaagaccagcaggaggt

SEQ ID NO: 111635 - DNA, 26 bp, Homo sapiens
ggcaagatgaagaccagcaggaggtc

SEQ ID NO: 111636 - DNA, 26 bp, Homo sapiens
gcaagatgaagaccagcaggaggtcg

SEQ ID NO: 111637 - DNA, 26 bp, Homo sapiens
caagatgaagaccagcaggaggtcgg

SEQ ID NO: 111638 - DNA, 26 bp, Homo sapiens
aagatgaagaccagcaggaggtcggc

SEQ ID NO: 111639 - DNA, 26 bp, Homo sapiens
agatgaagaccagcaggaggtcggcc

SEQ ID NO: 111640 - DNA, 26 bp, Homo sapiens
gatgaagaccagcaggaggtcggcca

SEQ ID NO: 111641 - DNA, 26 bp, Homo sapiens
atgaagaccagcaggaggtcggccac

SEQ ID NO: 111642 - DNA, 26 bp, Homo sapiens
tgaagaccagcaggaggtcggccacg

SEQ ID NO: 111643 - DNA, 26 bp, Homo sapiens
gaagaccagcaggaggtcggccacgg

SEQ ID NO: 111644 - DNA, 26 bp, Homo sapiens
aagaccagcaggaggtcggccacggc

SEQ ID NO: 111645 - DNA, 26 bp, Homo sapiens
agaccagcaggaggtcggccacggcc

SEQ ID NO: 111646 - DNA, 26 bp, Homo sapiens
gaccagcaggaggtcggccacggcca

SEQ ID NO: 111647 - DNA, 26 bp, Homo sapiens
accagcaggaggtcggccacggccag

SEQ ID NO: 111648 - DNA, 26 bp, Homo sapiens
ccagcaggaggtcggccacggccagg

SEQ ID NO: 111649 - DNA, 26 bp, Homo sapiens
cagcaggaggtcggccacggccaggt

SEQ ID NO: 111650 - DNA, 26 bp, Homo sapiens
agcaggaggtcggccacggccaggtg

SEQ ID NO: 111651 - DNA, 26 bp, Homo sapiens
gcaggaggtcggccacggccaggtgg

SEQ ID NO: 111652 - DNA, 26 bp, Homo sapiens
caggaggtcggccacggccaggtgga

SEQ ID NO: 111653 - DNA, 26 bp, Homo sapiens
aggaggtcggccacggccaggtggaa

SEQ ID NO: 111654 - DNA, 26 bp, Homo sapiens
ggaggtcggccacggccaggtggaac

SEQ ID NO: 111655 - DNA, 26 bp, Homo sapiens
gaggtcggccacggccaggtggaaca

SEQ ID NO: 111656 - DNA, 26 bp, Homo sapiens
aggtcggccacggccaggtggaacag

SEQ ID NO: 111657 - DNA, 26 bp, Homo sapiens
ggtcggccacggccaggtggaacagg

SEQ ID NO: 111658 - DNA, 26 bp, Homo sapiens
gtcggccacggccaggtggaacagga

SEQ ID NO: 111659 - DNA, 26 bp, Homo sapiens
tcggccacggccaggtggaacaggaa

SEQ ID NO: 111660 - DNA, 26 bp, Homo sapiens
cggccacggccaggtggaacaggaag

SEQ ID NO: 111661 - DNA, 26 bp, Homo sapiens
ggccacggccaggtggaacaggaagg

SEQ ID NO: 111662 - DNA, 26 bp, Homo sapiens
gccacggccaggtggaacaggaaggt

SEQ ID NO: 111663 - DNA, 26 bp, Homo sapiens
ccacggccaggtggaacaggaaggtc

SEQ ID NO: 111664 - DNA, 26 bp, Homo sapiens
cacggccaggtggaacaggaaggtct

SEQ ID NO: 111665 - DNA, 26 bp, Homo sapiens
acggccaggtggaacaggaaggtctc

SEQ ID NO: 111666 - DNA, 26 bp, Homo sapiens
cggccaggtggaacaggaaggtctcc

SEQ ID NO: 111667 - DNA, 26 bp, Homo sapiens
ggccaggtggaacaggaaggtctccg

SEQ ID NO: 111668 - DNA, 26 bp, Homo sapiens
gccaggtggaacaggaaggtctccgt

SEQ ID NO: 111669 - DNA, 26 bp, Homo sapiens
ccaggtggaacaggaaggtctccgtg

SEQ ID NO: 111670 - DNA, 26 bp, Homo sapiens
caggtggaacaggaaggtctccgtgg

SEQ ID NO: 111671 - DNA, 26 bp, Homo sapiens
aggtggaacaggaaggtctccgtgga

SEQ ID NO: 111672 - DNA, 26 bp, Homo sapiens
ggtggaacaggaaggtctccgtggaa

SEQ ID NO: 111673 - DNA, 26 bp, Homo sapiens
gtggaacaggaaggtctccgtggaac

SEQ ID NO: 111674 - DNA, 26 bp, Homo sapiens
tggaacaggaaggtctccgtggaact

SEQ ID NO: 111675 - DNA, 26 bp, Homo sapiens
ggaacaggaaggtctccgtggaactg

SEQ ID NO: 111676 - DNA, 26 bp, Homo sapiens
gaacaggaaggtctccgtggaactgc

SEQ ID NO: 111677 - DNA, 26 bp, Homo sapiens
aacaggaaggtctccgtggaactgcg

SEQ ID NO: 111678 - DNA, 26 bp, Homo sapiens
acaggaaggtctccgtggaactgcgt

SEQ ID NO: 111679 - DNA, 26 bp, Homo sapiens
caggaaggtctccgtggaactgcgtg

SEQ ID NO: 111680 - DNA, 26 bp, Homo sapiens
aggaaggtctccgtggaactgcgtgt

SEQ ID NO: 111681 - DNA, 26 bp, Homo sapiens
ggaaggtctccgtggaactgcgtgtc

SEQ ID NO: 111682 - DNA, 26 bp, Homo sapiens
gaaggtctccgtggaactgcgtgtct

SEQ ID NO: 111683 - DNA, 26 bp, Homo sapiens
aaggtctccgtggaactgcgtgtctg

SEQ ID NO: 111684 - DNA, 26 bp, Homo sapiens
aggtctccgtggaactgcgtgtctgc

SEQ ID NO: 111685 - DNA, 26 bp, Homo sapiens
ggtctccgtggaactgcgtgtctgcc

SEQ ID NO: 111686 - DNA, 26 bp, Homo sapiens
gtctccgtggaactgcgtgtctgccg

SEQ ID NO: 111687 - DNA, 26 bp, Homo sapiens
tctccgtggaactgcgtgtctgccgg

SEQ ID NO: 111688 - DNA, 26 bp, Homo sapiens
ctccgtggaactgcgtgtctgccggt

SEQ ID NO: 111689 - DNA, 26 bp, Homo sapiens
tccgtggaactgcgtgtctgccggtg

SEQ ID NO: 111690 - DNA, 26 bp, Homo sapiens
ccgtggaactgcgtgtctgccggtgc

SEQ ID NO: 111691 - DNA, 26 bp, Homo sapiens
cgtggaactgcgtgtctgccggtgcc

SEQ ID NO: 111692 - DNA, 26 bp, Homo sapiens
gtggaactgcgtgtctgccggtgccg

SEQ ID NO: 111693 - DNA, 26 bp, Homo sapiens
tggaactgcgtgtctgccggtgccgc

SEQ ID NO: 111694 - DNA, 26 bp, Homo sapiens
ggaactgcgtgtctgccggtgccgct

SEQ ID NO: 111695 - DNA, 26 bp, Homo sapiens
gaactgcgtgtctgccggtgccgctc

SEQ ID NO: 111696 - DNA, 26 bp, Homo sapiens
aactgcgtgtctgccggtgccgctcc

SEQ ID NO: 111697 - DNA, 26 bp, Homo sapiens
actgcgtgtctgccggtgccgctcca

SEQ ID NO: 111698 - DNA, 26 bp, Homo sapiens
ctgcgtgtctgccggtgccgctccag

SEQ ID NO: 111699 - DNA, 26 bp, Homo sapiens
tgcgtgtctgccggtgccgctccagg

SEQ ID NO: 111700 - DNA, 26 bp, Homo sapiens
gcgtgtctgccggtgccgctccagga

SEQ ID NO: 111701 - DNA, 26 bp, Homo sapiens
cgtgtctgccggtgccgctccaggat

SEQ ID NO: 111702 - DNA, 26 bp, Homo sapiens
gtgtctgccggtgccgctccaggatc

SEQ ID NO: 111703 - DNA, 26 bp, Homo sapiens
tgtctgccggtgccgctccaggatca

SEQ ID NO: 111704 - DNA, 26 bp, Homo sapiens
gtctgccggtgccgctccaggatcac

SEQ ID NO: 111705 - DNA, 26 bp, Homo sapiens
tctgccggtgccgctccaggatcacc

SEQ ID NO: 111706 - DNA, 26 bp, Homo sapiens
ctgccggtgccgctccaggatcacca

SEQ ID NO: 111707 - DNA, 26 bp, Homo sapiens
tgccggtgccgctccaggatcaccag

SEQ ID NO: 111708 - DNA, 26 bp, Homo sapiens
gccggtgccgctccaggatcaccagc

SEQ ID NO: 111709 - DNA, 26 bp, Homo sapiens
ccggtgccgctccaggatcaccagca

SEQ ID NO: 111710 - DNA, 26 bp, Homo sapiens
cggtgccgctccaggatcaccagcac

SEQ ID NO: 111711 - DNA, 26 bp, Homo sapiens
ggtgccgctccaggatcaccagcacc

SEQ ID NO: 111712 - DNA, 26 bp, Homo sapiens
gtgccgctccaggatcaccagcacca

SEQ ID NO: 111713 - DNA, 26 bp, Homo sapiens
tgccgctccaggatcaccagcaccag

SEQ ID NO: 111714 - DNA, 26 bp, Homo sapiens
gccgctccaggatcaccagcaccagg

SEQ ID NO: 111715 - DNA, 26 bp, Homo sapiens
ccgctccaggatcaccagcaccagga

SEQ ID NO: 111716 - DNA, 26 bp, Homo sapiens
cgctccaggatcaccagcaccaggac

SEQ ID NO: 111717 - DNA, 26 bp, Homo sapiens
gctccaggatcaccagcaccaggacg

SEQ ID NO: 111718 - DNA, 26 bp, Homo sapiens
ctccaggatcaccagcaccaggacgt

SEQ ID NO: 111719 - DNA, 26 bp, Homo sapiens
tccaggatcaccagcaccaggacgtt

SEQ ID NO: 111720 - DNA, 26 bp, Homo sapiens
ccaggatcaccagcaccaggacgttg

SEQ ID NO: 111721 - DNA, 26 bp, Homo sapiens
caggatcaccagcaccaggacgttgc

SEQ ID NO: 111722 - DNA, 26 bp, Homo sapiens
aggatcaccagcaccaggacgttgcc

SEQ ID NO: 111723 - DNA, 26 bp, Homo sapiens
ggatcaccagcaccaggacgttgccg

SEQ ID NO: 111724 - DNA, 26 bp, Homo sapiens
gatcaccagcaccaggacgttgccga

SEQ ID NO: 111725 - DNA, 26 bp, Homo sapiens
atcaccagcaccaggacgttgccgat

SEQ ID NO: 111726 - DNA, 26 bp, Homo sapiens
tcaccagcaccaggacgttgccgatc

SEQ ID NO: 111727 - DNA, 26 bp, Homo sapiens
caccagcaccaggacgttgccgatca

SEQ ID NO: 111728 - DNA, 26 bp, Homo sapiens
accagcaccaggacgttgccgatcac

SEQ ID NO: 111729 - DNA, 26 bp, Homo sapiens
ccagcaccaggacgttgccgatcacg

SEQ ID NO: 111730 - DNA, 26 bp, Homo sapiens
cagcaccaggacgttgccgatcacgc

SEQ ID NO: 111731 - DNA, 26 bp, Homo sapiens
agcaccaggacgttgccgatcacgcc

SEQ ID NO: 111732 - DNA, 26 bp, Homo sapiens
gcaccaggacgttgccgatcacgccc

SEQ ID NO: 111733 - DNA, 26 bp, Homo sapiens
caccaggacgttgccgatcacgccca

SEQ ID NO: 111734 - DNA, 26 bp, Homo sapiens
accaggacgttgccgatcacgcccag

SEQ ID NO: 111735 - DNA, 26 bp, Homo sapiens
ccaggacgttgccgatcacgcccagg

SEQ ID NO: 111736 - DNA, 26 bp, Homo sapiens
caggacgttgccgatcacgcccagga

SEQ ID NO: 111737 - DNA, 26 bp, Homo sapiens
aggacgttgccgatcacgcccaggag

SEQ ID NO: 111738 - DNA, 26 bp, Homo sapiens
ggacgttgccgatcacgcccaggagg

SEQ ID NO: 111739 - DNA, 26 bp, Homo sapiens
gacgttgccgatcacgcccaggagga

SEQ ID NO: 111740 - DNA, 26 bp, Homo sapiens
acgttgccgatcacgcccaggaggaa

SEQ ID NO: 111741 - DNA, 26 bp, Homo sapiens
cgttgccgatcacgcccaggaggaag

SEQ ID NO: 111742 - DNA, 26 bp, Homo sapiens
gttgccgatcacgcccaggaggaaga

SEQ ID NO: 111743 - DNA, 26 bp, Homo sapiens
ttgccgatcacgcccaggaggaagat

SEQ ID NO: 111744 - DNA, 26 bp, Homo sapiens
tgccgatcacgcccaggaggaagatg

SEQ ID NO: 111745 - DNA, 26 bp, Homo sapiens
gccgatcacgcccaggaggaagatga

SEQ ID NO: 111746 - DNA, 26 bp, Homo sapiens
ccgatcacgcccaggaggaagatgag

SEQ ID NO: 111747 - DNA, 26 bp, Homo sapiens
cgatcacgcccaggaggaagatgagg

SEQ ID NO: 111748 - DNA, 26 bp, Homo sapiens
gatcacgcccaggaggaagatgaggc

SEQ ID NO: 111749 - DNA, 26 bp, Homo sapiens
atcacgcccaggaggaagatgaggct

SEQ ID NO: 111750 - DNA, 26 bp, Homo sapiens
tcacgcccaggaggaagatgaggctg

SEQ ID NO: 111751 - DNA, 26 bp, Homo sapiens
cacgcccaggaggaagatgaggctgt

SEQ ID NO: 111752 - DNA, 26 bp, Homo sapiens
acgcccaggaggaagatgaggctgta

SEQ ID NO: 111753 - DNA, 26 bp, Homo sapiens
cgcccaggaggaagatgaggctgtag

SEQ ID NO: 111754 - DNA, 26 bp, Homo sapiens
gcccaggaggaagatgaggctgtagg

SEQ ID NO: 111755 - DNA, 26 bp, Homo sapiens
cccaggaggaagatgaggctgtaggc

SEQ ID NO: 111756 - DNA, 26 bp, Homo sapiens
ccaggaggaagatgaggctgtaggcc

SEQ ID NO: 111757 - DNA, 26 bp, Homo sapiens
caggaggaagatgaggctgtaggcca

SEQ ID NO: 111758 - DNA, 26 bp, Homo sapiens
aggaggaagatgaggctgtaggccac

SEQ ID NO: 111759 - DNA, 26 bp, Homo sapiens
ggaggaagatgaggctgtaggccacg

SEQ ID NO: 111760 - DNA, 26 bp, Homo sapiens
gaggaagatgaggctgtaggccacgg

SEQ ID NO: 111761 - DNA, 26 bp, Homo sapiens
aggaagatgaggctgtaggccacggg

SEQ ID NO: 111762 - DNA, 26 bp, Homo sapiens
ggaagatgaggctgtaggccacgggc

SEQ ID NO: 111763 - DNA, 26 bp, Homo sapiens
gaagatgaggctgtaggccacgggca

SEQ ID NO: 111764 - DNA, 26 bp, Homo sapiens
aagatgaggctgtaggccacgggcac

SEQ ID NO: 111765 - DNA, 26 bp, Homo sapiens
agatgaggctgtaggccacgggcacg

SEQ ID NO: 111766 - DNA, 26 bp, Homo sapiens
gatgaggctgtaggccacgggcacga

SEQ ID NO: 111767 - DNA, 26 bp, Homo sapiens
atgaggctgtaggccacgggcacgaa

SEQ ID NO: 111768 - DNA, 26 bp, Homo sapiens
tgaggctgtaggccacgggcacgaac

SEQ ID NO: 111769 - DNA, 26 bp, Homo sapiens
gaggctgtaggccacgggcacgaaca

SEQ ID NO: 111770 - DNA, 26 bp, Homo sapiens
aggctgtaggccacgggcacgaacac

SEQ ID NO: 111771 - DNA, 26 bp, Homo sapiens
ggctgtaggccacgggcacgaacacg

SEQ ID NO: 111772 - DNA, 26 bp, Homo sapiens
gctgtaggccacgggcacgaacacgg

SEQ ID NO: 111773 - DNA, 26 bp, Homo sapiens
ctgtaggccacgggcacgaacacggc

SEQ ID NO: 111774 - DNA, 26 bp, Homo sapiens
tgtaggccacgggcacgaacacggcc

SEQ ID NO: 111775 - DNA, 26 bp, Homo sapiens
gtaggccacgggcacgaacacggcct

SEQ ID NO: 111776 - DNA, 26 bp, Homo sapiens
taggccacgggcacgaacacggcctt

SEQ ID NO: 111777 - DNA, 26 bp, Homo sapiens
aggccacgggcacgaacacggccttg

SEQ ID NO: 111778 - DNA, 26 bp, Homo sapiens
ggccacgggcacgaacacggccttga

SEQ ID NO: 111779 - DNA, 26 bp, Homo sapiens
gccacgggcacgaacacggccttgaa

SEQ ID NO: 111780 - DNA, 26 bp, Homo sapiens
ccacgggcacgaacacggccttgaag

SEQ ID NO: 111781 - DNA, 26 bp, Homo sapiens
cacgggcacgaacacggccttgaagg

SEQ ID NO: 111782 - DNA, 26 bp, Homo sapiens
acgggcacgaacacggccttgaagga

SEQ ID NO: 111783 - DNA, 26 bp, Homo sapiens
cgggcacgaacacggccttgaaggag

SEQ ID NO: 111784 - DNA, 26 bp, Homo sapiens
gggcacgaacacggccttgaaggagg

SEQ ID NO: 111785 - DNA, 26 bp, Homo sapiens
ggcacgaacacggccttgaaggaggc

SEQ ID NO: 111786 - DNA, 26 bp, Homo sapiens
gcacgaacacggccttgaaggaggcc

SEQ ID NO: 111787 - DNA, 26 bp, Homo sapiens
cacgaacacggccttgaaggaggcca

SEQ ID NO: 111788 - DNA, 26 bp, Homo sapiens
acgaacacggccttgaaggaggccat

SEQ ID NO: 111789 - DNA, 26 bp, Homo sapiens
cgaacacggccttgaaggaggccatg

SEQ ID NO: 111790 - DNA, 26 bp, Homo sapiens
gaacacggccttgaaggaggccatga

SEQ ID NO: 111791 - DNA, 26 bp, Homo sapiens
aacacggccttgaaggaggccatgag

SEQ ID NO: 111792 - DNA, 26 bp, Homo sapiens
acacggccttgaaggaggccatgagg

SEQ ID NO: 111793 - DNA, 26 bp, Homo sapiens
cacggccttgaaggaggccatgaggg

SEQ ID NO: 111794 - DNA, 26 bp, Homo sapiens
acggccttgaaggaggccatgagggg

SEQ ID NO: 111795 - DNA, 26 bp, Homo sapiens
cggccttgaaggaggccatgaggggc

SEQ ID NO: 111796 - DNA, 26 bp, Homo sapiens
ggccttgaaggaggccatgaggggcc

SEQ ID NO: 111797 - DNA, 26 bp, Homo sapiens
gccttgaaggaggccatgaggggccc

SEQ ID NO: 111798 - DNA, 26 bp, Homo sapiens
ccttgaaggaggccatgaggggcccc

SEQ ID NO: 111799 - DNA, 26 bp, Homo sapiens
cttgaaggaggccatgaggggcccct

SEQ ID NO: 111800 - DNA, 26 bp, Homo sapiens
ttgaaggaggccatgaggggcccctc

SEQ ID NO: 111801 - DNA, 26 bp, Homo sapiens
tgaaggaggccatgaggggcccctct

SEQ ID NO: 111802 - DNA, 26 bp, Homo sapiens
gaaggaggccatgaggggcccctctg

SEQ ID NO: 111803 - DNA, 26 bp, Homo sapiens
aaggaggccatgaggggcccctctgt

SEQ ID NO: 111804 - DNA, 26 bp, Homo sapiens
aggaggccatgaggggcccctctgtg

SEQ ID NO: 111805 - DNA, 26 bp, Homo sapiens
ggaggccatgaggggcccctctgtgg

SEQ ID NO: 111806 - DNA, 26 bp, Homo sapiens
gaggccatgaggggcccctctgtggc

SEQ ID NO: 111807 - DNA, 26 bp, Homo sapiens
aggccatgaggggcccctctgtggca

SEQ ID NO: 111808 - DNA, 26 bp, Homo sapiens
ggccatgaggggcccctctgtggcag

SEQ ID NO: 111809 - DNA, 26 bp, Homo sapiens
gccatgaggggcccctctgtggcagg

SEQ ID NO: 111810 - DNA, 26 bp, Homo sapiens
ccatgaggggcccctctgtggcaggg

SEQ ID NO: 111811 - DNA, 26 bp, Homo sapiens
catgaggggcccctctgtggcagggc

SEQ ID NO: 111812 - DNA, 26 bp, Homo sapiens
atgaggggcccctctgtggcagggca

SEQ ID NO: 111813 - DNA, 26 bp, Homo sapiens
tgaggggcccctctgtggcagggcag

SEQ ID NO: 111814 - DNA, 26 bp, Homo sapiens
gaggggcccctctgtggcagggcaga

SEQ ID NO: 111815 - DNA, 26 bp, Homo sapiens
aggggcccctctgtggcagggcagag

SEQ ID NO: 111816 - DNA, 26 bp, Homo sapiens
ggggcccctctgtggcagggcagaga

SEQ ID NO: 111817 - DNA, 26 bp, Homo sapiens
gggcccctctgtggcagggcagagat

SEQ ID NO: 111818 - DNA, 26 bp, Homo sapiens
ggcccctctgtggcagggcagagatg

SEQ ID NO: 111819 - DNA, 26 bp, Homo sapiens
gcccctctgtggcagggcagagatga

SEQ ID NO: 111820 - DNA, 26 bp, Homo sapiens
cccctctgtggcagggcagagatgat

SEQ ID NO: 111821 - DNA, 26 bp, Homo sapiens
ccctctgtggcagggcagagatgatt

SEQ ID NO: 111822 - DNA, 26 bp, Homo sapiens
cctctgtggcagggcagagatgattt

SEQ ID NO: 111823 - DNA, 26 bp, Homo sapiens
ctctgtggcagggcagagatgatttt

SEQ ID NO: 111824 - DNA, 26 bp, Homo sapiens
tctgtggcagggcagagatgattttc

SEQ ID NO: 111825 - DNA, 26 bp, Homo sapiens
ctgtggcagggcagagatgattttcc

SEQ ID NO: 111826 - DNA, 26 bp, Homo sapiens
tgtggcagggcagagatgattttcca

SEQ ID NO: 111827 - DNA, 26 bp, Homo sapiens
gtggcagggcagagatgattttccac

SEQ ID NO: 111828 - DNA, 26 bp, Homo sapiens
tggcagggcagagatgattttccacc

SEQ ID NO: 111829 - DNA, 26 bp, Homo sapiens
ggcagggcagagatgattttccacca

SEQ ID NO: 111830 - DNA, 26 bp, Homo sapiens
gcagggcagagatgattttccaccag

SEQ ID NO: 111831 - DNA, 26 bp, Homo sapiens
cagggcagagatgattttccaccagg

SEQ ID NO: 111832 - DNA, 26 bp, Homo sapiens
agggcagagatgattttccaccaggg

SEQ ID NO: 111833 - DNA, 26 bp, Homo sapiens
gggcagagatgattttccaccaggga

SEQ ID NO: 111834 - DNA, 26 bp, Homo sapiens
ggcagagatgattttccaccagggag

SEQ ID NO: 111835 - DNA, 26 bp, Homo sapiens
gcagagatgattttccaccagggagg

SEQ ID NO: 111836 - DNA, 26 bp, Homo sapiens
cagagatgattttccaccagggaggt

SEQ ID NO: 111837 - DNA, 26 bp, Homo sapiens
agagatgattttccaccagggaggtg

SEQ ID NO: 111838 - DNA, 26 bp, Homo sapiens
gagatgattttccaccagggaggtgt

SEQ ID NO: 111839 - DNA, 26 bp, Homo sapiens
agatgattttccaccagggaggtgtc

SEQ ID NO: 111840 - DNA, 26 bp, Homo sapiens
gatgattttccaccagggaggtgtcg

SEQ ID NO: 111841 - DNA, 26 bp, Homo sapiens
atgattttccaccagggaggtgtcgt

SEQ ID NO: 111842 - DNA, 26 bp, Homo sapiens
tgattttccaccagggaggtgtcgtt

SEQ ID NO: 111843 - DNA, 26 bp, Homo sapiens
gattttccaccagggaggtgtcgtta

SEQ ID NO: 111844 - DNA, 26 bp, Homo sapiens
attttccaccagggaggtgtcgttat

SEQ ID NO: 111845 - DNA, 26 bp, Homo sapiens
ttttccaccagggaggtgtcgttata

SEQ ID NO: 111846 - DNA, 26 bp, Homo sapiens
tttccaccagggaggtgtcgttatag

SEQ ID NO: 111847 - DNA, 26 bp, Homo sapiens
ttccaccagggaggtgtcgttatagt

SEQ ID NO: 111848 - DNA, 26 bp, Homo sapiens
tccaccagggaggtgtcgttatagtt

SEQ ID NO: 111849 - DNA, 26 bp, Homo sapiens
ccaccagggaggtgtcgttatagttg

SEQ ID NO: 111850 - DNA, 26 bp, Homo sapiens
caccagggaggtgtcgttatagttgt

SEQ ID NO: 111851 - DNA, 26 bp, Homo sapiens
accagggaggtgtcgttatagttgtc

SEQ ID NO: 111852 - DNA, 26 bp, Homo sapiens
ccagggaggtgtcgttatagttgtcc

SEQ ID NO: 111853 - DNA, 26 bp, Homo sapiens
cagggaggtgtcgttatagttgtcca

SEQ ID NO: 111854 - DNA, 26 bp, Homo sapiens
agggaggtgtcgttatagttgtccaa

SEQ ID NO: 111855 - DNA, 26 bp, Homo sapiens
gggaggtgtcgttatagttgtccaat

SEQ ID NO: 111856 - DNA, 26 bp, Homo sapiens
ggaggtgtcgttatagttgtccaatc

SEQ ID NO: 111857 - DNA, 26 bp, Homo sapiens
gaggtgtcgttatagttgtccaatct

SEQ ID NO: 111858 - DNA, 26 bp, Homo sapiens
aggtgtcgttatagttgtccaatctg

SEQ ID NO: 111859 - DNA, 26 bp, Homo sapiens
ggtgtcgttatagttgtccaatctgt

SEQ ID NO: 111860 - DNA, 26 bp, Homo sapiens
gtgtcgttatagttgtccaatctgtc

SEQ ID NO: 111861 - DNA, 26 bp, Homo sapiens
tgtcgttatagttgtccaatctgtcc

SEQ ID NO: 111862 - DNA, 26 bp, Homo sapiens
gtcgttatagttgtccaatctgtcca

SEQ ID NO: 111863 - DNA, 26 bp, Homo sapiens
tcgttatagttgtccaatctgtccag

SEQ ID NO: 111864 - DNA, 26 bp, Homo sapiens
cgttatagttgtccaatctgtccagt

SEQ ID NO: 111865 - DNA, 26 bp, Homo sapiens
gttatagttgtccaatctgtccagtt

SEQ ID NO: 111866 - DNA, 26 bp, Homo sapiens
ttatagttgtccaatctgtccagttc

SEQ ID NO: 111867 - DNA, 26 bp, Homo sapiens
tatagttgtccaatctgtccagttcc

SEQ ID NO: 111868 - DNA, 26 bp, Homo sapiens
atagttgtccaatctgtccagttccc

SEQ ID NO: 111869 - DNA, 26 bp, Homo sapiens
tagttgtccaatctgtccagttccca

SEQ ID NO: 111870 - DNA, 26 bp, Homo sapiens
agttgtccaatctgtccagttcccag

SEQ ID NO: 111871 - DNA, 26 bp, Homo sapiens
gttgtccaatctgtccagttcccaga

SEQ ID NO: 111872 - DNA, 26 bp, Homo sapiens
ttgtccaatctgtccagttcccagaa

SEQ ID NO: 111873 - DNA, 26 bp, Homo sapiens
tgtccaatctgtccagttcccagaac

SEQ ID NO: 111874 - DNA, 26 bp, Homo sapiens
gtccaatctgtccagttcccagaaca

SEQ ID NO: 111875 - DNA, 26 bp, Homo sapiens
tccaatctgtccagttcccagaacag

SEQ ID NO: 111876 - DNA, 26 bp, Homo sapiens
ccaatctgtccagttcccagaacagg

SEQ ID NO: 111877 - DNA, 26 bp, Homo sapiens
caatctgtccagttcccagaacaggt

SEQ ID NO: 111878 - DNA, 26 bp, Homo sapiens
aatctgtccagttcccagaacaggtc

SEQ ID NO: 111879 - DNA, 26 bp, Homo sapiens
atctgtccagttcccagaacaggtcc

SEQ ID NO: 111880 - DNA, 26 bp, Homo sapiens
tctgtccagttcccagaacaggtcct

SEQ ID NO: 111881 - DNA, 26 bp, Homo sapiens
ctgtccagttcccagaacaggtcctc

SEQ ID NO: 111882 - DNA, 26 bp, Homo sapiens
tgtccagttcccagaacaggtcctcc

SEQ ID NO: 111883 - DNA, 26 bp, Homo sapiens
gtccagttcccagaacaggtcctcca

SEQ ID NO: 111884 - DNA, 26 bp, Homo sapiens
tccagttcccagaacaggtcctccag

SEQ ID NO: 111885 - DNA, 26 bp, Homo sapiens
ccagttcccagaacaggtcctccagg

SEQ ID NO: 111886 - DNA, 26 bp, Homo sapiens
cagttcccagaacaggtcctccaggt

SEQ ID NO: 111887 - DNA, 26 bp, Homo sapiens
agttcccagaacaggtcctccaggtt

SEQ ID NO: 111888 - DNA, 26 bp, Homo sapiens
gttcccagaacaggtcctccaggttc

SEQ ID NO: 111889 - DNA, 26 bp, Homo sapiens
ttcccagaacaggtcctccaggttct

SEQ ID NO: 111890 - DNA, 26 bp, Homo sapiens
tcccagaacaggtcctccaggttctc

SEQ ID NO: 111891 - DNA, 26 bp, Homo sapiens
cccagaacaggtcctccaggttctcg

SEQ ID NO: 111892 - DNA, 26 bp, Homo sapiens
ccagaacaggtcctccaggttctcga

SEQ ID NO: 111893 - DNA, 26 bp, Homo sapiens
cagaacaggtcctccaggttctcgag

SEQ ID NO: 111894 - DNA, 26 bp, Homo sapiens
agaacaggtcctccaggttctcgagg

SEQ ID NO: 111895 - DNA, 26 bp, Homo sapiens
gaacaggtcctccaggttctcgaggt

SEQ ID NO: 111896 - DNA, 26 bp, Homo sapiens
aacaggtcctccaggttctcgaggtc

SEQ ID NO: 111897 - DNA, 26 bp, Homo sapiens
acaggtcctccaggttctcgaggtcc

SEQ ID NO: 111898 - DNA, 26 bp, Homo sapiens
caggtcctccaggttctcgaggtcca

SEQ ID NO: 111899 - DNA, 26 bp, Homo sapiens
aggtcctccaggttctcgaggtccat

SEQ ID NO: 111900 - DNA, 26 bp, Homo sapiens
ggtcctccaggttctcgaggtccatt

SEQ ID NO: 111901 - DNA, 26 bp, Homo sapiens
gtcctccaggttctcgaggtccattt

SEQ ID NO: 111902 - DNA, 26 bp, Homo sapiens
tcctccaggttctcgaggtccatttc

SEQ ID NO: 111903 - DNA, 26 bp, Homo sapiens
cctccaggttctcgaggtccatttcc

SEQ ID NO: 111904 - DNA, 26 bp, Homo sapiens
ctccaggttctcgaggtccatttcca

SEQ ID NO: 111905 - DNA, 26 bp, Homo sapiens
tccaggttctcgaggtccatttccag

SEQ ID NO: 111906 - DNA, 26 bp, Homo sapiens
ccaggttctcgaggtccatttccagc

SEQ ID NO: 111907 - DNA, 26 bp, Homo sapiens
caggttctcgaggtccatttccagcg

SEQ ID NO: 111908 - DNA, 26 bp, Homo sapiens
aggttctcgaggtccatttccagcgt

SEQ ID NO: 111909 - DNA, 26 bp, Homo sapiens
ggttctcgaggtccatttccagcgtt

SEQ ID NO: 111910 - DNA, 26 bp, Homo sapiens
gttctcgaggtccatttccagcgtta

SEQ ID NO: 111911 - DNA, 26 bp, Homo sapiens
ttctcgaggtccatttccagcgttag

SEQ ID NO: 111912 - DNA, 26 bp, Homo sapiens
tctcgaggtccatttccagcgttagc

SEQ ID NO: 111913 - DNA, 26 bp, Homo sapiens
ctcgaggtccatttccagcgttagcg

SEQ ID NO: 111914 - DNA, 26 bp, Homo sapiens
tcgaggtccatttccagcgttagcgg

SEQ ID NO: 111915 - DNA, 26 bp, Homo sapiens
cgaggtccatttccagcgttagcggg

SEQ ID NO: 111916 - DNA, 26 bp, Homo sapiens
gaggtccatttccagcgttagcgggt

SEQ ID NO: 111917 - DNA, 26 bp, Homo sapiens
aggtccatttccagcgttagcgggta

SEQ ID NO: 111918 - DNA, 26 bp, Homo sapiens
ggtccatttccagcgttagcgggtag

SEQ ID NO: 111919 - DNA, 26 bp, Homo sapiens
gtccatttccagcgttagcgggtagt

SEQ ID NO: 111920 - DNA, 26 bp, Homo sapiens
tccatttccagcgttagcgggtagtt

SEQ ID NO: 111921 - DNA, 26 bp, Homo sapiens
ccatttccagcgttagcgggtagttc

SEQ ID NO: 111922 - DNA, 26 bp, Homo sapiens
catttccagcgttagcgggtagttca

SEQ ID NO: 111923 - DNA, 26 bp, Homo sapiens
atttccagcgttagcgggtagttcat

SEQ ID NO: 111924 - DNA, 26 bp, Homo sapiens
tttccagcgttagcgggtagttcatg

SEQ ID NO: 111925 - DNA, 26 bp, Homo sapiens
ttccagcgttagcgggtagttcatgg

SEQ ID NO: 111926 - DNA, 26 bp, Homo sapiens
tccagcgttagcgggtagttcatggc

SEQ ID NO: 111927 - DNA, 26 bp, Homo sapiens
ccagcgttagcgggtagttcatggct

SEQ ID NO: 111928 - DNA, 26 bp, Homo sapiens
cagcgttagcgggtagttcatggctg

SEQ ID NO: 111929 - DNA, 26 bp, Homo sapiens
agcgttagcgggtagttcatggctgt

SEQ ID NO: 111930 - DNA, 26 bp, Homo sapiens
gcgttagcgggtagttcatggctgtg

SEQ ID NO: 111931 - DNA, 26 bp, Homo sapiens
cgttagcgggtagttcatggctgtgc

SEQ ID NO: 111932 - DNA, 26 bp, Homo sapiens
gttagcgggtagttcatggctgtgcc

SEQ ID NO: 111933 - DNA, 26 bp, Homo sapiens
ttagcgggtagttcatggctgtgccg

SEQ ID NO: 111934 - DNA, 26 bp, Homo sapiens
tagcgggtagttcatggctgtgccgg

SEQ ID NO: 111935 - DNA, 26 bp, Homo sapiens
agcgggtagttcatggctgtgccggc

SEQ ID NO: 111936 - DNA, 26 bp, Homo sapiens
gcgggtagttcatggctgtgccggct

SEQ ID NO: 111937 - DNA, 26 bp, Homo sapiens
cgggtagttcatggctgtgccggctg

SEQ ID NO: 111938 - DNA, 26 bp, Homo sapiens
gggtagttcatggctgtgccggctgt

SEQ ID NO: 111939 - DNA, 26 bp, Homo sapiens
ggtagttcatggctgtgccggctgtg

SEQ ID NO: 111940 - DNA, 26 bp, Homo sapiens
gtagttcatggctgtgccggctgtga

SEQ ID NO: 111941 - DNA, 26 bp, Homo sapiens
tagttcatggctgtgccggctgtgag

SEQ ID NO: 111942 - DNA, 26 bp, Homo sapiens
agttcatggctgtgccggctgtgagt

SEQ ID NO: 111943 - DNA, 26 bp, Homo sapiens
gttcatggctgtgccggctgtgagtc

SEQ ID NO: 111944 - DNA, 26 bp, Homo sapiens
ttcatggctgtgccggctgtgagtca

SEQ ID NO: 111945 - DNA, 26 bp, Homo sapiens
tcatggctgtgccggctgtgagtcac

SEQ ID NO: 111946 - DNA, 26 bp, Homo sapiens
catggctgtgccggctgtgagtcacc

SEQ ID NO: 111947 - DNA, 26 bp, Homo sapiens
atggctgtgccggctgtgagtcacca

SEQ ID NO: 111948 - DNA, 26 bp, Homo sapiens
tggctgtgccggctgtgagtcaccag

SEQ ID NO: 111949 - DNA, 26 bp, Homo sapiens
ggctgtgccggctgtgagtcaccaga

SEQ ID NO: 111950 - DNA, 26 bp, Homo sapiens
gctgtgccggctgtgagtcaccagac

SEQ ID NO: 111951 - DNA, 26 bp, Homo sapiens
ctgtgccggctgtgagtcaccagact

SEQ ID NO: 111952 - DNA, 26 bp, Homo sapiens
tgtgccggctgtgagtcaccagactg

SEQ ID NO: 111953 - DNA, 26 bp, Homo sapiens
gtgccggctgtgagtcaccagactgg

SEQ ID NO: 111954 - DNA, 26 bp, Homo sapiens
tgccggctgtgagtcaccagactggt

SEQ ID NO: 111955 - DNA, 26 bp, Homo sapiens
gccggctgtgagtcaccagactggtc

SEQ ID NO: 111956 - DNA, 26 bp, Homo sapiens
ccggctgtgagtcaccagactggtca

SEQ ID NO: 111957 - DNA, 26 bp, Homo sapiens
cggctgtgagtcaccagactggtcac

SEQ ID NO: 111958 - DNA, 26 bp, Homo sapiens
ggctgtgagtcaccagactggtcact

SEQ ID NO: 111959 - DNA, 26 bp, Homo sapiens
gctgtgagtcaccagactggtcactg

SEQ ID NO: 111960 - DNA, 26 bp, Homo sapiens
ctgtgagtcaccagactggtcactgt

SEQ ID NO: 111961 - DNA, 26 bp, Homo sapiens
tgtgagtcaccagactggtcactgtc

SEQ ID NO: 111962 - DNA, 26 bp, Homo sapiens
gtgagtcaccagactggtcactgtct

SEQ ID NO: 111963 - DNA, 26 bp, Homo sapiens
tgagtcaccagactggtcactgtctt

SEQ ID NO: 111964 - DNA, 26 bp, Homo sapiens
gagtcaccagactggtcactgtctta

SEQ ID NO: 111965 - DNA, 26 bp, Homo sapiens
agtcaccagactggtcactgtcttat

SEQ ID NO: 111966 - DNA, 26 bp, Homo sapiens
gtcaccagactggtcactgtcttatg

SEQ ID NO: 111967 - DNA, 26 bp, Homo sapiens
tcaccagactggtcactgtcttatgt

SEQ ID NO: 111968 - DNA, 26 bp, Homo sapiens
caccagactggtcactgtcttatgtt

SEQ ID NO: 111969 - DNA, 26 bp, Homo sapiens
accagactggtcactgtcttatgttg

SEQ ID NO: 111970 - DNA, 26 bp, Homo sapiens
ccagactggtcactgtcttatgttga

SEQ ID NO: 111971 - DNA, 26 bp, Homo sapiens
cagactggtcactgtcttatgttgag

SEQ ID NO: 111972 - DNA, 26 bp, Homo sapiens
agactggtcactgtcttatgttgaga

SEQ ID NO: 111973 - DNA, 26 bp, Homo sapiens
gactggtcactgtcttatgttgagag

SEQ ID NO: 111974 - DNA, 26 bp, Homo sapiens
ttttccactcagctaagaggtattta

SEQ ID NO: 111975 - DNA, 26 bp, Homo sapiens
tttccactcagctaagaggtatttat

SEQ ID NO: 111976 - DNA, 26 bp, Homo sapiens
ttccactcagctaagaggtatttatt

SEQ ID NO: 111977 - DNA, 26 bp, Homo sapiens
tccactcagctaagaggtatttattc

SEQ ID NO: 111978 - DNA, 26 bp, Homo sapiens
ccactcagctaagaggtatttattca

SEQ ID NO: 111979 - DNA, 26 bp, Homo sapiens
cactcagctaagaggtatttattcag

SEQ ID NO: 111980 - DNA, 26 bp, Homo sapiens
actcagctaagaggtatttattcagt

SEQ ID NO: 111981 - DNA, 26 bp, Homo sapiens
ctcagctaagaggtatttattcagtt

SEQ ID NO: 111982 - DNA, 26 bp, Homo sapiens
tcagctaagaggtatttattcagttg

SEQ ID NO: 111983 - DNA, 26 bp, Homo sapiens
cagctaagaggtatttattcagttgc

SEQ ID NO: 111984 - DNA, 26 bp, Homo sapiens
agctaagaggtatttattcagttgct

SEQ ID NO: 111985 - DNA, 26 bp, Homo sapiens
gctaagaggtatttattcagttgctg

SEQ ID NO: 111986 - DNA, 26 bp, Homo sapiens
ctaagaggtatttattcagttgctgg

SEQ ID NO: 111987 - DNA, 26 bp, Homo sapiens
taagaggtatttattcagttgctggc

SEQ ID NO: 111988 - DNA, 26 bp, Homo sapiens
aagaggtatttattcagttgctggca

SEQ ID NO: 111989 - DNA, 26 bp, Homo sapiens
agaggtatttattcagttgctggcac

SEQ ID NO: 111990 - DNA, 26 bp, Homo sapiens
gaggtatttattcagttgctggcacc

SEQ ID NO: 111991 - DNA, 26 bp, Homo sapiens
aggtatttattcagttgctggcacct

SEQ ID NO: 111992 - DNA, 26 bp, Homo sapiens
ggtatttattcagttgctggcacctc

SEQ ID NO: 111993 - DNA, 26 bp, Homo sapiens
gtatttattcagttgctggcacctct

SEQ ID NO: 111994 - DNA, 26 bp, Homo sapiens
tatttattcagttgctggcacctctc

SEQ ID NO: 111995 - DNA, 26 bp, Homo sapiens
atttattcagttgctggcacctctcc

SEQ ID NO: 111996 - DNA, 26 bp, Homo sapiens
tttattcagttgctggcacctctccc

SEQ ID NO: 111997 - DNA, 26 bp, Homo sapiens
ttattcagttgctggcacctctccca

SEQ ID NO: 111998 - DNA, 26 bp, Homo sapiens
tattcagttgctggcacctctcccag

SEQ ID NO: 111999 - DNA, 26 bp, Homo sapiens
attcagttgctggcacctctcccagt

SEQ ID NO: 112000 - DNA, 26 bp, Homo sapiens
ttcagttgctggcacctctcccagtg

SEQ ID NO: 112001 - DNA, 26 bp, Homo sapiens
tcagttgctggcacctctcccagtgt

SEQ ID NO: 112002 - DNA, 26 bp, Homo sapiens
cagttgctggcacctctcccagtgta

SEQ ID NO: 112003 - DNA, 26 bp, Homo sapiens
agttgctggcacctctcccagtgtaa

SEQ ID NO: 112004 - DNA, 26 bp, Homo sapiens
gttgctggcacctctcccagtgtaaa

SEQ ID NO: 112005 - DNA, 26 bp, Homo sapiens
ttgctggcacctctcccagtgtaaat

SEQ ID NO: 112006 - DNA, 26 bp, Homo sapiens
tgctggcacctctcccagtgtaaatc

SEQ ID NO: 112007 - DNA, 26 bp, Homo sapiens
gctggcacctctcccagtgtaaatct

SEQ ID NO: 112008 - DNA, 26 bp, Homo sapiens
ctggcacctctcccagtgtaaatctg

SEQ ID NO: 112009 - DNA, 26 bp, Homo sapiens
tggcacctctcccagtgtaaatctgg

SEQ ID NO: 112010 - DNA, 26 bp, Homo sapiens
ggcacctctcccagtgtaaatctgga

SEQ ID NO: 112011 - DNA, 26 bp, Homo sapiens
gcacctctcccagtgtaaatctggac

SEQ ID NO: 112012 - DNA, 26 bp, Homo sapiens
cacctctcccagtgtaaatctggact

SEQ ID NO: 112013 - DNA, 26 bp, Homo sapiens
acctctcccagtgtaaatctggactt

SEQ ID NO: 112014 - DNA, 26 bp, Homo sapiens
cctctcccagtgtaaatctggacttg

SEQ ID NO: 112015 - DNA, 26 bp, Homo sapiens
ctctcccagtgtaaatctggacttgg

SEQ ID NO: 112016 - DNA, 26 bp, Homo sapiens
tctcccagtgtaaatctggacttggc

SEQ ID NO: 112017 - DNA, 26 bp, Homo sapiens
ctcccagtgtaaatctggacttggct

SEQ ID NO: 112018 - DNA, 26 bp, Homo sapiens
tcccagtgtaaatctggacttggctc

SEQ ID NO: 112019 - DNA, 26 bp, Homo sapiens
cccagtgtaaatctggacttggctcc

SEQ ID NO: 112020 - DNA, 26 bp, Homo sapiens
ccagtgtaaatctggacttggctcca

SEQ ID NO: 112021 - DNA, 26 bp, Homo sapiens
cagtgtaaatctggacttggctccag

SEQ ID NO: 112022 - DNA, 26 bp, Homo sapiens
agtgtaaatctggacttggctccaga

SEQ ID NO: 112023 - DNA, 26 bp, Homo sapiens
gtgtaaatctggacttggctccagag

SEQ ID NO: 112024 - DNA, 26 bp, Homo sapiens
tgtaaatctggacttggctccagaga

SEQ ID NO: 112025 - DNA, 26 bp, Homo sapiens
gtaaatctggacttggctccagagaa

SEQ ID NO: 112026 - DNA, 26 bp, Homo sapiens
taaatctggacttggctccagagaag

SEQ ID NO: 112027 - DNA, 26 bp, Homo sapiens
aaatctggacttggctccagagaagg

SEQ ID NO: 112028 - DNA, 26 bp, Homo sapiens
aatctggacttggctccagagaaggt

SEQ ID NO: 112029 - DNA, 26 bp, Homo sapiens
atctggacttggctccagagaaggtg

SEQ ID NO: 112030 - DNA, 26 bp, Homo sapiens
tctggacttggctccagagaaggtgt

SEQ ID NO: 112031 - DNA, 26 bp, Homo sapiens
ctggacttggctccagagaaggtgtt

SEQ ID NO: 112032 - DNA, 26 bp, Homo sapiens
tggacttggctccagagaaggtgttt

SEQ ID NO: 112033 - DNA, 26 bp, Homo sapiens
ggacttggctccagagaaggtgtttc

SEQ ID NO: 112034 - DNA, 26 bp, Homo sapiens
gacttggctccagagaaggtgtttca

SEQ ID NO: 112035 - DNA, 26 bp, Homo sapiens
acttggctccagagaaggtgtttcat

SEQ ID NO: 112036 - DNA, 26 bp, Homo sapiens
cttggctccagagaaggtgtttcatt

SEQ ID NO: 112037 - DNA, 26 bp, Homo sapiens
ttggctccagagaaggtgtttcatta

SEQ ID NO: 112038 - DNA, 26 bp, Homo sapiens
tggctccagagaaggtgtttcattac

SEQ ID NO: 112039 - DNA, 26 bp, Homo sapiens
ggctccagagaaggtgtttcattaca

SEQ ID NO: 112040 - DNA, 26 bp, Homo sapiens
gctccagagaaggtgtttcattacag

SEQ ID NO: 112041 - DNA, 26 bp, Homo sapiens
ctccagagaaggtgtttcattacagc

SEQ ID NO: 112042 - DNA, 26 bp, Homo sapiens
tccagagaaggtgtttcattacagcg

SEQ ID NO: 112043 - DNA, 26 bp, Homo sapiens
ccagagaaggtgtttcattacagcgg

SEQ ID NO: 112044 - DNA, 26 bp, Homo sapiens
cagagaaggtgtttcattacagcggg

SEQ ID NO: 112045 - DNA, 26 bp, Homo sapiens
agagaaggtgtttcattacagcgggg

SEQ ID NO: 112046 - DNA, 26 bp, Homo sapiens
gagaaggtgtttcattacagcggggg

SEQ ID NO: 112047 - DNA, 26 bp, Homo sapiens
agaaggtgtttcattacagcgggggc

SEQ ID NO: 112048 - DNA, 26 bp, Homo sapiens
gaaggtgtttcattacagcgggggct

SEQ ID NO: 112049 - DNA, 26 bp, Homo sapiens
aaggtgtttcattacagcgggggctt

SEQ ID NO: 112050 - DNA, 26 bp, Homo sapiens
aggtgtttcattacagcgggggctta

SEQ ID NO: 112051 - DNA, 26 bp, Homo sapiens
ggtgtttcattacagcgggggcttag

SEQ ID NO: 112052 - DNA, 26 bp, Homo sapiens
gtgtttcattacagcgggggcttagt

SEQ ID NO: 112053 - DNA, 26 bp, Homo sapiens
tgtttcattacagcgggggcttagtt

SEQ ID NO: 112054 - DNA, 26 bp, Homo sapiens
gtttcattacagcgggggcttagttt

SEQ ID NO: 112055 - DNA, 26 bp, Homo sapiens
tttcattacagcgggggcttagtttg

SEQ ID NO: 112056 - DNA, 26 bp, Homo sapiens
ttcattacagcgggggcttagtttgc

SEQ ID NO: 112057 - DNA, 26 bp, Homo sapiens
tcattacagcgggggcttagtttgct

SEQ ID NO: 112058 - DNA, 26 bp, Homo sapiens
cattacagcgggggcttagtttgctt

SEQ ID NO: 112059 - DNA, 26 bp, Homo sapiens
attacagcgggggcttagtttgcttc

SEQ ID NO: 112060 - DNA, 26 bp, Homo sapiens
ttacagcgggggcttagtttgcttcc

SEQ ID NO: 112061 - DNA, 26 bp, Homo sapiens
tacagcgggggcttagtttgcttcct

SEQ ID NO: 112062 - DNA, 26 bp, Homo sapiens
acagcgggggcttagtttgcttcctg

SEQ ID NO: 112063 - DNA, 26 bp, Homo sapiens
cagcgggggcttagtttgcttcctgt

SEQ ID NO: 112064 - DNA, 26 bp, Homo sapiens
agcgggggcttagtttgcttcctgta

SEQ ID NO: 112065 - DNA, 26 bp, Homo sapiens
gcgggggcttagtttgcttcctgtag

SEQ ID NO: 112066 - DNA, 26 bp, Homo sapiens
cgggggcttagtttgcttcctgtagt

SEQ ID NO: 112067 - DNA, 26 bp, Homo sapiens
gggggcttagtttgcttcctgtagtt

SEQ ID NO: 112068 - DNA, 26 bp, Homo sapiens
ggggcttagtttgcttcctgtagtta

SEQ ID NO: 112069 - DNA, 26 bp, Homo sapiens
gggcttagtttgcttcctgtagttag

SEQ ID NO: 112070 - DNA, 26 bp, Homo sapiens
ggcttagtttgcttcctgtagttagt

SEQ ID NO: 112071 - DNA, 26 bp, Homo sapiens
gcttagtttgcttcctgtagttagta

SEQ ID NO: 112072 - DNA, 26 bp, Homo sapiens
cttagtttgcttcctgtagttagtag

SEQ ID NO: 112073 - DNA, 26 bp, Homo sapiens
ttagtttgcttcctgtagttagtagc

SEQ ID NO: 112074 - DNA, 26 bp, Homo sapiens
tagtttgcttcctgtagttagtagcg

SEQ ID NO: 112075 - DNA, 26 bp, Homo sapiens
agtttgcttcctgtagttagtagcgt

SEQ ID NO: 112076 - DNA, 26 bp, Homo sapiens
gtttgcttcctgtagttagtagcgtt

SEQ ID NO: 112077 - DNA, 26 bp, Homo sapiens
tttgcttcctgtagttagtagcgttt

SEQ ID NO: 112078 - DNA, 26 bp, Homo sapiens
ttgcttcctgtagttagtagcgtttc

SEQ ID NO: 112079 - DNA, 26 bp, Homo sapiens
tgcttcctgtagttagtagcgtttca

SEQ ID NO: 112080 - DNA, 26 bp, Homo sapiens
gcttcctgtagttagtagcgtttcat

SEQ ID NO: 112081 - DNA, 26 bp, Homo sapiens
cttcctgtagttagtagcgtttcatg

SEQ ID NO: 112082 - DNA, 26 bp, Homo sapiens
ttcctgtagttagtagcgtttcatgg

SEQ ID NO: 112083 - DNA, 26 bp, Homo sapiens
tcctgtagttagtagcgtttcatggt

SEQ ID NO: 112084 - DNA, 26 bp, Homo sapiens
cctgtagttagtagcgtttcatggtt

SEQ ID NO: 112085 - DNA, 26 bp, Homo sapiens
ctgtagttagtagcgtttcatggttt

SEQ ID NO: 112086 - DNA, 26 bp, Homo sapiens
tgtagttagtagcgtttcatggtttt

SEQ ID NO: 112087 - DNA, 26 bp, Homo sapiens
gtagttagtagcgtttcatggttttc

SEQ ID NO: 112088 - DNA, 26 bp, Homo sapiens
tagttagtagcgtttcatggttttct

SEQ ID NO: 112089 - DNA, 26 bp, Homo sapiens
agttagtagcgtttcatggttttctt

SEQ ID NO: 112090 - DNA, 26 bp, Homo sapiens
gttagtagcgtttcatggttttcttt

SEQ ID NO: 112091 - DNA, 26 bp, Homo sapiens
ttagtagcgtttcatggttttcttta

SEQ ID NO: 112092 - DNA, 26 bp, Homo sapiens
tagtagcgtttcatggttttctttat

SEQ ID NO: 112093 - DNA, 26 bp, Homo sapiens
agtagcgtttcatggttttctttatc

SEQ ID NO: 112094 - DNA, 26 bp, Homo sapiens
gtagcgtttcatggttttctttatcc

SEQ ID NO: 112095 - DNA, 26 bp, Homo sapiens
tagcgtttcatggttttctttatcca

SEQ ID NO: 112096 - DNA, 26 bp, Homo sapiens
agcgtttcatggttttctttatccag

SEQ ID NO: 112097 - DNA, 26 bp, Homo sapiens
gcgtttcatggttttctttatccagt

SEQ ID NO: 112098 - DNA, 26 bp, Homo sapiens
cgtttcatggttttctttatccagtg

SEQ ID NO: 112099 - DNA, 26 bp, Homo sapiens
gtttcatggttttctttatccagtgt

SEQ ID NO: 112100 - DNA, 26 bp, Homo sapiens
tttcatggttttctttatccagtgta

SEQ ID NO: 112101 - DNA, 26 bp, Homo sapiens
ttcatggttttctttatccagtgtac

SEQ ID NO: 112102 - DNA, 26 bp, Homo sapiens
tcatggttttctttatccagtgtaca

SEQ ID NO: 112103 - DNA, 26 bp, Homo sapiens
catggttttctttatccagtgtacaa

SEQ ID NO: 112104 - DNA, 26 bp, Homo sapiens
atggttttctttatccagtgtacaaa

SEQ ID NO: 112105 - DNA, 26 bp, Homo sapiens
tggttttctttatccagtgtacaaag

SEQ ID NO: 112106 - DNA, 26 bp, Homo sapiens
ggttttctttatccagtgtacaaagc

SEQ ID NO: 112107 - DNA, 26 bp, Homo sapiens
gttttctttatccagtgtacaaagct

SEQ ID NO: 112108 - DNA, 26 bp, Homo sapiens
ttttctttatccagtgtacaaagctt

SEQ ID NO: 112109 - DNA, 26 bp, Homo sapiens
tttctttatccagtgtacaaagcttg

SEQ ID NO: 112110 - DNA, 26 bp, Homo sapiens
ttctttatccagtgtacaaagcttga

SEQ ID NO: 112111 - DNA, 26 bp, Homo sapiens
tctttatccagtgtacaaagcttgag

SEQ ID NO: 112112 - DNA, 26 bp, Homo sapiens
ctttatccagtgtacaaagcttgaga

SEQ ID NO: 112113 - DNA, 26 bp, Homo sapiens
tttatccagtgtacaaagcttgagac

SEQ ID NO: 112114 - DNA, 26 bp, Homo sapiens
ttatccagtgtacaaagcttgagact

SEQ ID NO: 112115 - DNA, 26 bp, Homo sapiens
tatccagtgtacaaagcttgagactt

SEQ ID NO: 112116 - DNA, 26 bp, Homo sapiens
atccagtgtacaaagcttgagacttt

SEQ ID NO: 112117 - DNA, 26 bp, Homo sapiens
tccagtgtacaaagcttgagactttg

SEQ ID NO: 112118 - DNA, 26 bp, Homo sapiens
ccagtgtacaaagcttgagactttgg

SEQ ID NO: 112119 - DNA, 26 bp, Homo sapiens
cagtgtacaaagcttgagactttggt

SEQ ID NO: 112120 - DNA, 26 bp, Homo sapiens
agtgtacaaagcttgagactttggtg

SEQ ID NO: 112121 - DNA, 26 bp, Homo sapiens
gtgtacaaagcttgagactttggtgc

SEQ ID NO: 112122 - DNA, 26 bp, Homo sapiens
tgtacaaagcttgagactttggtgca

SEQ ID NO: 112123 - DNA, 26 bp, Homo sapiens
gtacaaagcttgagactttggtgcag

SEQ ID NO: 112124 - DNA, 26 bp, Homo sapiens
tacaaagcttgagactttggtgcagg

SEQ ID NO: 112125 - DNA, 26 bp, Homo sapiens
acaaagcttgagactttggtgcaggc

SEQ ID NO: 112126 - DNA, 26 bp, Homo sapiens
caaagcttgagactttggtgcaggct

SEQ ID NO: 112127 - DNA, 26 bp, Homo sapiens
aaagcttgagactttggtgcaggctc

SEQ ID NO: 112128 - DNA, 26 bp, Homo sapiens
aagcttgagactttggtgcaggctcg

SEQ ID NO: 112129 - DNA, 26 bp, Homo sapiens
agcttgagactttggtgcaggctcgt

SEQ ID NO: 112130 - DNA, 26 bp, Homo sapiens
gcttgagactttggtgcaggctcgtg

SEQ ID NO: 112131 - DNA, 26 bp, Homo sapiens
cttgagactttggtgcaggctcgtgg

SEQ ID NO: 112132 - DNA, 26 bp, Homo sapiens
ttgagactttggtgcaggctcgtgga

SEQ ID NO: 112133 - DNA, 26 bp, Homo sapiens
tgagactttggtgcaggctcgtggag

SEQ ID NO: 112134 - DNA, 26 bp, Homo sapiens
gagactttggtgcaggctcgtggagg

SEQ ID NO: 112135 - DNA, 26 bp, Homo sapiens
agactttggtgcaggctcgtggaggc

SEQ ID NO: 112136 - DNA, 26 bp, Homo sapiens
gactttggtgcaggctcgtggaggca

SEQ ID NO: 112137 - DNA, 26 bp, Homo sapiens
actttggtgcaggctcgtggaggcat

SEQ ID NO: 112138 - DNA, 26 bp, Homo sapiens
ctttggtgcaggctcgtggaggcatg

SEQ ID NO: 112139 - DNA, 26 bp, Homo sapiens
tttggtgcaggctcgtggaggcatgc

SEQ ID NO: 112140 - DNA, 26 bp, Homo sapiens
ttggtgcaggctcgtggaggcatgcc

SEQ ID NO: 112141 - DNA, 26 bp, Homo sapiens
tggtgcaggctcgtggaggcatgcca

SEQ ID NO: 112142 - DNA, 26 bp, Homo sapiens
ggtgcaggctcgtggaggcatgccat

SEQ ID NO: 112143 - DNA, 26 bp, Homo sapiens
gtgcaggctcgtggaggcatgccatt

SEQ ID NO: 112144 - DNA, 26 bp, Homo sapiens
tgcaggctcgtggaggcatgccattg

SEQ ID NO: 112145 - DNA, 26 bp, Homo sapiens
gcaggctcgtggaggcatgccattgt

SEQ ID NO: 112146 - DNA, 26 bp, Homo sapiens
caggctcgtggaggcatgccattgtt

SEQ ID NO: 112147 - DNA, 26 bp, Homo sapiens
aggctcgtggaggcatgccattgttt

SEQ ID NO: 112148 - DNA, 26 bp, Homo sapiens
ggctcgtggaggcatgccattgtttc

SEQ ID NO: 112149 - DNA, 26 bp, Homo sapiens
gctcgtggaggcatgccattgtttcg

SEQ ID NO: 112150 - DNA, 26 bp, Homo sapiens
ctcgtggaggcatgccattgtttcgt

SEQ ID NO: 112151 - DNA, 26 bp, Homo sapiens
tcgtggaggcatgccattgtttcgtc

SEQ ID NO: 112152 - DNA, 26 bp, Homo sapiens
cgtggaggcatgccattgtttcgtcc

SEQ ID NO: 112153 - DNA, 26 bp, Homo sapiens
gtggaggcatgccattgtttcgtcca

SEQ ID NO: 112154 - DNA, 26 bp, Homo sapiens
tggaggcatgccattgtttcgtccat

SEQ ID NO: 112155 - DNA, 26 bp, Homo sapiens
ggaggcatgccattgtttcgtccata

SEQ ID NO: 112156 - DNA, 26 bp, Homo sapiens
gaggcatgccattgtttcgtccatag

SEQ ID NO: 112157 - DNA, 26 bp, Homo sapiens
aggcatgccattgtttcgtccatagg

SEQ ID NO: 112158 - DNA, 26 bp, Homo sapiens
ggcatgccattgtttcgtccatagga

SEQ ID NO: 112159 - DNA, 26 bp, Homo sapiens
gcatgccattgtttcgtccataggag

SEQ ID NO: 112160 - DNA, 26 bp, Homo sapiens
catgccattgtttcgtccataggaga

SEQ ID NO: 112161 - DNA, 26 bp, Homo sapiens
atgccattgtttcgtccataggagac

SEQ ID NO: 112162 - DNA, 26 bp, Homo sapiens
tgccattgtttcgtccataggagaca

SEQ ID NO: 112163 - DNA, 26 bp, Homo sapiens
gccattgtttcgtccataggagacaa

SEQ ID NO: 112164 - DNA, 26 bp, Homo sapiens
ccattgtttcgtccataggagacaat

SEQ ID NO: 112165 - DNA, 26 bp, Homo sapiens
cattgtttcgtccataggagacaatg

SEQ ID NO: 112166 - DNA, 26 bp, Homo sapiens
attgtttcgtccataggagacaatgc

SEQ ID NO: 112167 - DNA, 26 bp, Homo sapiens
ttgtttcgtccataggagacaatgcc

SEQ ID NO: 112168 - DNA, 26 bp, Homo sapiens
tgtttcgtccataggagacaatgccc

SEQ ID NO: 112169 - DNA, 26 bp, Homo sapiens
gtttcgtccataggagacaatgccct

SEQ ID NO: 112170 - DNA, 26 bp, Homo sapiens
tttcgtccataggagacaatgccctg

SEQ ID NO: 112171 - DNA, 26 bp, Homo sapiens
ttcgtccataggagacaatgccctgg

SEQ ID NO: 112172 - DNA, 26 bp, Homo sapiens
tcgtccataggagacaatgccctggg

SEQ ID NO: 112173 - DNA, 26 bp, Homo sapiens
cgtccataggagacaatgccctgggc

SEQ ID NO: 112174 - DNA, 26 bp, Homo sapiens
gtccataggagacaatgccctgggcc

SEQ ID NO: 112175 - DNA, 26 bp, Homo sapiens
tccataggagacaatgccctgggcca

SEQ ID NO: 112176 - DNA, 26 bp, Homo sapiens
ccataggagacaatgccctgggccac

SEQ ID NO: 112177 - DNA, 26 bp, Homo sapiens
cataggagacaatgccctgggccacc

SEQ ID NO: 112178 - DNA, 26 bp, Homo sapiens
ataggagacaatgccctgggccacct

SEQ ID NO: 112179 - DNA, 26 bp, Homo sapiens
taggagacaatgccctgggccacctt

SEQ ID NO: 112180 - DNA, 26 bp, Homo sapiens
aggagacaatgccctgggccaccttg

SEQ ID NO: 112181 - DNA, 26 bp, Homo sapiens
ggagacaatgccctgggccaccttgt

SEQ ID NO: 112182 - DNA, 26 bp, Homo sapiens
gagacaatgccctgggccaccttgtt

SEQ ID NO: 112183 - DNA, 26 bp, Homo sapiens
agacaatgccctgggccaccttgtta

SEQ ID NO: 112184 - DNA, 26 bp, Homo sapiens
gacaatgccctgggccaccttgttac

SEQ ID NO: 112185 - DNA, 26 bp, Homo sapiens
acaatgccctgggccaccttgttaca

SEQ ID NO: 112186 - DNA, 26 bp, Homo sapiens
caatgccctgggccaccttgttacac

SEQ ID NO: 112187 - DNA, 26 bp, Homo sapiens
aatgccctgggccaccttgttacaca

SEQ ID NO: 112188 - DNA, 26 bp, Homo sapiens
atgccctgggccaccttgttacacac

SEQ ID NO: 112189 - DNA, 26 bp, Homo sapiens
tgccctgggccaccttgttacacaca

SEQ ID NO: 112190 - DNA, 26 bp, Homo sapiens
gccctgggccaccttgttacacacaa

SEQ ID NO: 112191 - DNA, 26 bp, Homo sapiens
ccctgggccaccttgttacacacaag

SEQ ID NO: 112192 - DNA, 26 bp, Homo sapiens
cctgggccaccttgttacacacaaga

SEQ ID NO: 112193 - DNA, 26 bp, Homo sapiens
ctgggccaccttgttacacacaagag

SEQ ID NO: 112194 - DNA, 26 bp, Homo sapiens
tgggccaccttgttacacacaagagg

SEQ ID NO: 112195 - DNA, 26 bp, Homo sapiens
gggccaccttgttacacacaagaggg

SEQ ID NO: 112196 - DNA, 26 bp, Homo sapiens
ggccaccttgttacacacaagagggc

SEQ ID NO: 112197 - DNA, 26 bp, Homo sapiens
gccaccttgttacacacaagagggcc

SEQ ID NO: 112198 - DNA, 26 bp, Homo sapiens
ccaccttgttacacacaagagggcct

SEQ ID NO: 112199 - DNA, 26 bp, Homo sapiens
caccttgttacacacaagagggcctc

SEQ ID NO: 112200 - DNA, 26 bp, Homo sapiens
accttgttacacacaagagggcctcc

SEQ ID NO: 112201 - DNA, 26 bp, Homo sapiens
ccttgttacacacaagagggcctcca

SEQ ID NO: 112202 - DNA, 26 bp, Homo sapiens
cttgttacacacaagagggcctccag

SEQ ID NO: 112203 - DNA, 26 bp, Homo sapiens
ttgttacacacaagagggcctccaga

SEQ ID NO: 112204 - DNA, 26 bp, Homo sapiens
tgttacacacaagagggcctccagag

SEQ ID NO: 112205 - DNA, 26 bp, Homo sapiens
gttacacacaagagggcctccagagt

SEQ ID NO: 112206 - DNA, 26 bp, Homo sapiens
ttacacacaagagggcctccagagtc

SEQ ID NO: 112207 - DNA, 26 bp, Homo sapiens
tacacacaagagggcctccagagtcc

SEQ ID NO: 112208 - DNA, 26 bp, Homo sapiens
acacacaagagggcctccagagtccc

SEQ ID NO: 112209 - DNA, 26 bp, Homo sapiens
cacacaagagggcctccagagtcccc

SEQ ID NO: 112210 - DNA, 26 bp, Homo sapiens
acacaagagggcctccagagtccccc

SEQ ID NO: 112211 - DNA, 26 bp, Homo sapiens
cacaagagggcctccagagtccccct

SEQ ID NO: 112212 - DNA, 26 bp, Homo sapiens
acaagagggcctccagagtccccctt

SEQ ID NO: 112213 - DNA, 26 bp, Homo sapiens
caagagggcctccagagtccccctta

SEQ ID NO: 112214 - DNA, 26 bp, Homo sapiens
aagagggcctccagagtcccccttaa

SEQ ID NO: 112215 - DNA, 26 bp, Homo sapiens
agagggcctccagagtcccccttaaa

SEQ ID NO: 112216 - DNA, 26 bp, Homo sapiens
gagggcctccagagtcccccttaaag

SEQ ID NO: 112217 - DNA, 26 bp, Homo sapiens
agggcctccagagtcccccttaaagg

SEQ ID NO: 112218 - DNA, 26 bp, Homo sapiens
gggcctccagagtcccccttaaagga

SEQ ID NO: 112219 - DNA, 26 bp, Homo sapiens
ggcctccagagtcccccttaaaggaa

SEQ ID NO: 112220 - DNA, 26 bp, Homo sapiens
gcctccagagtcccccttaaaggaag

SEQ ID NO: 112221 - DNA, 26 bp, Homo sapiens
cctccagagtcccccttaaaggaagt

SEQ ID NO: 112222 - DNA, 26 bp, Homo sapiens
ctccagagtcccccttaaaggaagtc

SEQ ID NO: 112223 - DNA, 26 bp, Homo sapiens
tccagagtcccccttaaaggaagtct

SEQ ID NO: 112224 - DNA, 26 bp, Homo sapiens
ccagagtcccccttaaaggaagtctt

SEQ ID NO: 112225 - DNA, 26 bp, Homo sapiens
cagagtcccccttaaaggaagtcttt

SEQ ID NO: 112226 - DNA, 26 bp, Homo sapiens
agagtcccccttaaaggaagtctttt

SEQ ID NO: 112227 - DNA, 26 bp, Homo sapiens
gagtcccccttaaaggaagtcttttt

SEQ ID NO: 112228 - DNA, 26 bp, Homo sapiens
agtcccccttaaaggaagtcttttta

SEQ ID NO: 112229 - DNA, 26 bp, Homo sapiens
gtcccccttaaaggaagtctttttaa

SEQ ID NO: 112230 - DNA, 26 bp, Homo sapiens
tcccccttaaaggaagtctttttaat

SEQ ID NO: 112231 - DNA, 26 bp, Homo sapiens
cccccttaaaggaagtctttttaatc

SEQ ID NO: 112232 - DNA, 26 bp, Homo sapiens
ccccttaaaggaagtctttttaatct

SEQ ID NO: 112233 - DNA, 26 bp, Homo sapiens
cccttaaaggaagtctttttaatctc

SEQ ID NO: 112234 - DNA, 26 bp, Homo sapiens
ccttaaaggaagtctttttaatctct

SEQ ID NO: 112235 - DNA, 26 bp, Homo sapiens
cttaaaggaagtctttttaatctctg

SEQ ID NO: 112236 - DNA, 26 bp, Homo sapiens
ttaaaggaagtctttttaatctctgg

SEQ ID NO: 112237 - DNA, 26 bp, Homo sapiens
taaaggaagtctttttaatctctggg

SEQ ID NO: 112238 - DNA, 26 bp, Homo sapiens
aaaggaagtctttttaatctctgggt

SEQ ID NO: 112239 - DNA, 26 bp, Homo sapiens
aaggaagtctttttaatctctgggtc

SEQ ID NO: 112240 - DNA, 26 bp, Homo sapiens
aggaagtctttttaatctctgggtcc

SEQ ID NO: 112241 - DNA, 26 bp, Homo sapiens
ggaagtctttttaatctctgggtccc

SEQ ID NO: 112242 - DNA, 26 bp, Homo sapiens
gaagtctttttaatctctgggtcccc

SEQ ID NO: 112243 - DNA, 26 bp, Homo sapiens
aagtctttttaatctctgggtccccc

SEQ ID NO: 112244 - DNA, 26 bp, Homo sapiens
agtctttttaatctctgggtccccca

SEQ ID NO: 112245 - DNA, 26 bp, Homo sapiens
gtctttttaatctctgggtcccccac

SEQ ID NO: 112246 - DNA, 26 bp, Homo sapiens
tctttttaatctctgggtcccccacg

SEQ ID NO: 112247 - DNA, 26 bp, Homo sapiens
ctttttaatctctgggtcccccacgc

SEQ ID NO: 112248 - DNA, 26 bp, Homo sapiens
tttttaatctctgggtcccccacgca

SEQ ID NO: 112249 - DNA, 26 bp, Homo sapiens
ttttaatctctgggtcccccacgcac

SEQ ID NO: 112250 - DNA, 26 bp, Homo sapiens
tttaatctctgggtcccccacgcaca

SEQ ID NO: 112251 - DNA, 26 bp, Homo sapiens
ttaatctctgggtcccccacgcacaa

SEQ ID NO: 112252 - DNA, 26 bp, Homo sapiens
taatctctgggtcccccacgcacaac

SEQ ID NO: 112253 - DNA, 26 bp, Homo sapiens
aatctctgggtcccccacgcacaact

SEQ ID NO: 112254 - DNA, 26 bp, Homo sapiens
atctctgggtcccccacgcacaactc

SEQ ID NO: 112255 - DNA, 26 bp, Homo sapiens
tctctgggtcccccacgcacaactca

SEQ ID NO: 112256 - DNA, 26 bp, Homo sapiens
ctctgggtcccccacgcacaactcaa

SEQ ID NO: 112257 - DNA, 26 bp, Homo sapiens
tctgggtcccccacgcacaactcaat

SEQ ID NO: 112258 - DNA, 26 bp, Homo sapiens
ctgggtcccccacgcacaactcaatg

SEQ ID NO: 112259 - DNA, 26 bp, Homo sapiens
tgggtcccccacgcacaactcaatgg

SEQ ID NO: 112260 - DNA, 26 bp, Homo sapiens
gggtcccccacgcacaactcaatggt

SEQ ID NO: 112261 - DNA, 26 bp, Homo sapiens
ggtcccccacgcacaactcaatggta

SEQ ID NO: 112262 - DNA, 26 bp, Homo sapiens
gtcccccacgcacaactcaatggtac

SEQ ID NO: 112263 - DNA, 26 bp, Homo sapiens
tcccccacgcacaactcaatggtact

SEQ ID NO: 112264 - DNA, 26 bp, Homo sapiens
cccccacgcacaactcaatggtactg

SEQ ID NO: 112265 - DNA, 26 bp, Homo sapiens
ccccacgcacaactcaatggtactgt

SEQ ID NO: 112266 - DNA, 26 bp, Homo sapiens
cccacgcacaactcaatggtactgtc

SEQ ID NO: 112267 - DNA, 26 bp, Homo sapiens
ccacgcacaactcaatggtactgtcg

SEQ ID NO: 112268 - DNA, 26 bp, Homo sapiens
cacgcacaactcaatggtactgtcgt

SEQ ID NO: 112269 - DNA, 26 bp, Homo sapiens
acgcacaactcaatggtactgtcgta

SEQ ID NO: 112270 - DNA, 26 bp, Homo sapiens
cgcacaactcaatggtactgtcgtaa

SEQ ID NO: 112271 - DNA, 26 bp, Homo sapiens
gcacaactcaatggtactgtcgtaat

SEQ ID NO: 112272 - DNA, 26 bp, Homo sapiens
cacaactcaatggtactgtcgtaata

SEQ ID NO: 112273 - DNA, 26 bp, Homo sapiens
acaactcaatggtactgtcgtaataa

SEQ ID NO: 112274 - DNA, 26 bp, Homo sapiens
caactcaatggtactgtcgtaataat

SEQ ID NO: 112275 - DNA, 26 bp, Homo sapiens
aactcaatggtactgtcgtaataatg

SEQ ID NO: 112276 - DNA, 26 bp, Homo sapiens
actcaatggtactgtcgtaataatgg

SEQ ID NO: 112277 - DNA, 26 bp, Homo sapiens
ctcaatggtactgtcgtaataatggc

SEQ ID NO: 112278 - DNA, 26 bp, Homo sapiens
tcaatggtactgtcgtaataatggcg

SEQ ID NO: 112279 - DNA, 26 bp, Homo sapiens
caatggtactgtcgtaataatggcgt

SEQ ID NO: 112280 - DNA, 26 bp, Homo sapiens
aatggtactgtcgtaataatggcgta

SEQ ID NO: 112281 - DNA, 26 bp, Homo sapiens
atggtactgtcgtaataatggcgtaa

SEQ ID NO: 112282 - DNA, 26 bp, Homo sapiens
tggtactgtcgtaataatggcgtaag

SEQ ID NO: 112283 - DNA, 26 bp, Homo sapiens
ggtactgtcgtaataatggcgtaagt

SEQ ID NO: 112284 - DNA, 26 bp, Homo sapiens
gtactgtcgtaataatggcgtaagtc

SEQ ID NO: 112285 - DNA, 26 bp, Homo sapiens
tactgtcgtaataatggcgtaagtca

SEQ ID NO: 112286 - DNA, 26 bp, Homo sapiens
actgtcgtaataatggcgtaagtcag

SEQ ID NO: 112287 - DNA, 26 bp, Homo sapiens
ctgtcgtaataatggcgtaagtcaga

SEQ ID NO: 112288 - DNA, 26 bp, Homo sapiens
tgtcgtaataatggcgtaagtcagat

SEQ ID NO: 112289 - DNA, 26 bp, Homo sapiens
gtcgtaataatggcgtaagtcagatt

SEQ ID NO: 112290 - DNA, 26 bp, Homo sapiens
tcgtaataatggcgtaagtcagattc

SEQ ID NO: 112291 - DNA, 26 bp, Homo sapiens
cgtaataatggcgtaagtcagattcg

SEQ ID NO: 112292 - DNA, 26 bp, Homo sapiens
gtaataatggcgtaagtcagattcgc

SEQ ID NO: 112293 - DNA, 26 bp, Homo sapiens
taataatggcgtaagtcagattcgca

SEQ ID NO: 112294 - DNA, 26 bp, Homo sapiens
aataatggcgtaagtcagattcgcac

SEQ ID NO: 112295 - DNA, 26 bp, Homo sapiens
ataatggcgtaagtcagattcgcact

SEQ ID NO: 112296 - DNA, 26 bp, Homo sapiens
taatggcgtaagtcagattcgcactt

SEQ ID NO: 112297 - DNA, 26 bp, Homo sapiens
aatggcgtaagtcagattcgcacttt

SEQ ID NO: 112298 - DNA, 26 bp, Homo sapiens
atggcgtaagtcagattcgcactttc

SEQ ID NO: 112299 - DNA, 26 bp, Homo sapiens
tggcgtaagtcagattcgcactttcg

SEQ ID NO: 112300 - DNA, 26 bp, Homo sapiens
ggcgtaagtcagattcgcactttcga

SEQ ID NO: 112301 - DNA, 26 bp, Homo sapiens
gcgtaagtcagattcgcactttcgat

SEQ ID NO: 112302 - DNA, 26 bp, Homo sapiens
cgtaagtcagattcgcactttcgatc

SEQ ID NO: 112303 - DNA, 26 bp, Homo sapiens
gtaagtcagattcgcactttcgatct

SEQ ID NO: 112304 - DNA, 26 bp, Homo sapiens
taagtcagattcgcactttcgatctt

SEQ ID NO: 112305 - DNA, 26 bp, Homo sapiens
aagtcagattcgcactttcgatcttc

SEQ ID NO: 112306 - DNA, 26 bp, Homo sapiens
agtcagattcgcactttcgatcttcc

SEQ ID NO: 112307 - DNA, 26 bp, Homo sapiens
gtcagattcgcactttcgatcttcct

SEQ ID NO: 112308 - DNA, 26 bp, Homo sapiens
tcagattcgcactttcgatcttcctg

SEQ ID NO: 112309 - DNA, 26 bp, Homo sapiens
cagattcgcactttcgatcttcctgc

SEQ ID NO: 112310 - DNA, 26 bp, Homo sapiens
agattcgcactttcgatcttcctgca

SEQ ID NO: 112311 - DNA, 26 bp, Homo sapiens
gattcgcactttcgatcttcctgcac

SEQ ID NO: 112312 - DNA, 26 bp, Homo sapiens
attcgcactttcgatcttcctgcact

SEQ ID NO: 112313 - DNA, 26 bp, Homo sapiens
ttcgcactttcgatcttcctgcactg

SEQ ID NO: 112314 - DNA, 26 bp, Homo sapiens
tcgcactttcgatcttcctgcactgt

SEQ ID NO: 112315 - DNA, 26 bp, Homo sapiens
cgcactttcgatcttcctgcactgtc

SEQ ID NO: 112316 - DNA, 26 bp, Homo sapiens
gcactttcgatcttcctgcactgtca

SEQ ID NO: 112317 - DNA, 26 bp, Homo sapiens
cactttcgatcttcctgcactgtcat

SEQ ID NO: 112318 - DNA, 26 bp, Homo sapiens
actttcgatcttcctgcactgtcatc

SEQ ID NO: 112319 - DNA, 26 bp, Homo sapiens
ctttcgatcttcctgcactgtcatct

SEQ ID NO: 112320 - DNA, 26 bp, Homo sapiens
tttcgatcttcctgcactgtcatctt

SEQ ID NO: 112321 - DNA, 26 bp, Homo sapiens
ttcgatcttcctgcactgtcatcttc

SEQ ID NO: 112322 - DNA, 26 bp, Homo sapiens
tcgatcttcctgcactgtcatcttca

SEQ ID NO: 112323 - DNA, 26 bp, Homo sapiens
cgatcttcctgcactgtcatcttcac

SEQ ID NO: 112324 - DNA, 26 bp, Homo sapiens
gatcttcctgcactgtcatcttcacc

SEQ ID NO: 112325 - DNA, 26 bp, Homo sapiens
atcttcctgcactgtcatcttcacct

SEQ ID NO: 112326 - DNA, 26 bp, Homo sapiens
tcttcctgcactgtcatcttcacctc

SEQ ID NO: 112327 - DNA, 26 bp, Homo sapiens
cttcctgcactgtcatcttcacctct

SEQ ID NO: 112328 - DNA, 26 bp, Homo sapiens
ttcctgcactgtcatcttcacctctt

SEQ ID NO: 112329 - DNA, 26 bp, Homo sapiens
tcctgcactgtcatcttcacctcttg

SEQ ID NO: 112330 - DNA, 26 bp, Homo sapiens
cctgcactgtcatcttcacctcttgt

SEQ ID NO: 112331 - DNA, 26 bp, Homo sapiens
ctgcactgtcatcttcacctcttgta

SEQ ID NO: 112332 - DNA, 26 bp, Homo sapiens
tgcactgtcatcttcacctcttgtag

SEQ ID NO: 112333 - DNA, 26 bp, Homo sapiens
gcactgtcatcttcacctcttgtagt

SEQ ID NO: 112334 - DNA, 26 bp, Homo sapiens
cactgtcatcttcacctcttgtagtg

SEQ ID NO: 112335 - DNA, 26 bp, Homo sapiens
actgtcatcttcacctcttgtagtgt

SEQ ID NO: 112336 - DNA, 26 bp, Homo sapiens
ctgtcatcttcacctcttgtagtgtg

SEQ ID NO: 112337 - DNA, 26 bp, Homo sapiens
tgtcatcttcacctcttgtagtgtgt

SEQ ID NO: 112338 - DNA, 26 bp, Homo sapiens
gtcatcttcacctcttgtagtgtgtg

SEQ ID NO: 112339 - DNA, 26 bp, Homo sapiens
tcatcttcacctcttgtagtgtgtgt

SEQ ID NO: 112340 - DNA, 26 bp, Homo sapiens
catcttcacctcttgtagtgtgtgtg

SEQ ID NO: 112341 - DNA, 26 bp, Homo sapiens
atcttcacctcttgtagtgtgtgtga

SEQ ID NO: 112342 - DNA, 26 bp, Homo sapiens
tcttcacctcttgtagtgtgtgtgag

SEQ ID NO: 112343 - DNA, 26 bp, Homo sapiens
cttcacctcttgtagtgtgtgtgagt

SEQ ID NO: 112344 - DNA, 26 bp, Homo sapiens
ttcacctcttgtagtgtgtgtgagtg

SEQ ID NO: 112345 - DNA, 26 bp, Homo sapiens
tcacctcttgtagtgtgtgtgagtgt

SEQ ID NO: 112346 - DNA, 26 bp, Homo sapiens
cacctcttgtagtgtgtgtgagtgtt

SEQ ID NO: 112347 - DNA, 26 bp, Homo sapiens
acctcttgtagtgtgtgtgagtgttt

SEQ ID NO: 112348 - DNA, 26 bp, Homo sapiens
cctcttgtagtgtgtgtgagtgtttt

SEQ ID NO: 112349 - DNA, 26 bp, Homo sapiens
ctcttgtagtgtgtgtgagtgttttc

SEQ ID NO: 112350 - DNA, 26 bp, Homo sapiens
tcttgtagtgtgtgtgagtgttttcc

SEQ ID NO: 112351 - DNA, 26 bp, Homo sapiens
cttgtagtgtgtgtgagtgttttccc

SEQ ID NO: 112352 - DNA, 26 bp, Homo sapiens
ttgtagtgtgtgtgagtgttttccca

SEQ ID NO: 112353 - DNA, 26 bp, Homo sapiens
tgtagtgtgtgtgagtgttttcccag

SEQ ID NO: 112354 - DNA, 26 bp, Homo sapiens
gtagtgtgtgtgagtgttttcccagg

SEQ ID NO: 112355 - DNA, 26 bp, Homo sapiens
tagtgtgtgtgagtgttttcccaggg

SEQ ID NO: 112356 - DNA, 26 bp, Homo sapiens
agtgtgtgtgagtgttttcccagggg

SEQ ID NO: 112357 - DNA, 26 bp, Homo sapiens
gtgtgtgtgagtgttttcccaggggg

SEQ ID NO: 112358 - DNA, 26 bp, Homo sapiens
tgtgtgtgagtgttttcccagggggg

SEQ ID NO: 112359 - DNA, 26 bp, Homo sapiens
gtgtgtgagtgttttcccaggggggc

SEQ ID NO: 112360 - DNA, 26 bp, Homo sapiens
tgtgtgagtgttttcccaggggggcc

SEQ ID NO: 112361 - DNA, 26 bp, Homo sapiens
gtgtgagtgttttcccaggggggccg

SEQ ID NO: 112362 - DNA, 26 bp, Homo sapiens
tgtgagtgttttcccaggggggccgt

SEQ ID NO: 112363 - DNA, 26 bp, Homo sapiens
gtgagtgttttcccaggggggccgtc

SEQ ID NO: 112364 - DNA, 26 bp, Homo sapiens
tgagtgttttcccaggggggccgtct

SEQ ID NO: 112365 - DNA, 26 bp, Homo sapiens
gagtgttttcccaggggggccgtctg

SEQ ID NO: 112366 - DNA, 26 bp, Homo sapiens
agtgttttcccaggggggccgtctgc

SEQ ID NO: 112367 - DNA, 26 bp, Homo sapiens
gtgttttcccaggggggccgtctgcc

SEQ ID NO: 112368 - DNA, 26 bp, Homo sapiens
tgttttcccaggggggccgtctgccc

SEQ ID NO: 112369 - DNA, 26 bp, Homo sapiens
gttttcccaggggggccgtctgcccc

SEQ ID NO: 112370 - DNA, 26 bp, Homo sapiens
ttttcccaggggggccgtctgccccc

SEQ ID NO: 112371 - DNA, 26 bp, Homo sapiens
tttcccaggggggccgtctgccccca

SEQ ID NO: 112372 - DNA, 26 bp, Homo sapiens
ttcccaggggggccgtctgcccccag

SEQ ID NO: 112373 - DNA, 26 bp, Homo sapiens
tcccaggggggccgtctgcccccagc

SEQ ID NO: 112374 - DNA, 26 bp, Homo sapiens
cccaggggggccgtctgcccccagcc

SEQ ID NO: 112375 - DNA, 26 bp, Homo sapiens
ccaggggggccgtctgcccccagccg

SEQ ID NO: 112376 - DNA, 26 bp, Homo sapiens
caggggggccgtctgcccccagccgg

SEQ ID NO: 112377 - DNA, 26 bp, Homo sapiens
aggggggccgtctgcccccagccggc

SEQ ID NO: 112378 - DNA, 26 bp, Homo sapiens
ggggggccgtctgcccccagccggcc

SEQ ID NO: 112379 - DNA, 26 bp, Homo sapiens
gggggccgtctgcccccagccggcca

SEQ ID NO: 112380 - DNA, 26 bp, Homo sapiens
ggggccgtctgcccccagccggccac

SEQ ID NO: 112381 - DNA, 26 bp, Homo sapiens
gggccgtctgcccccagccggccaca

SEQ ID NO: 112382 - DNA, 26 bp, Homo sapiens
ggccgtctgcccccagccggccacac

SEQ ID NO: 112383 - DNA, 26 bp, Homo sapiens
gccgtctgcccccagccggccacact

SEQ ID NO: 112384 - DNA, 26 bp, Homo sapiens
ccgtctgcccccagccggccacactg

SEQ ID NO: 112385 - DNA, 26 bp, Homo sapiens
cgtctgcccccagccggccacactgc

SEQ ID NO: 112386 - DNA, 26 bp, Homo sapiens
gtctgcccccagccggccacactgca

SEQ ID NO: 112387 - DNA, 26 bp, Homo sapiens
tctgcccccagccggccacactgcat

SEQ ID NO: 112388 - DNA, 26 bp, Homo sapiens
ctgcccccagccggccacactgcatg

SEQ ID NO: 112389 - DNA, 26 bp, Homo sapiens
tgcccccagccggccacactgcatgt

SEQ ID NO: 112390 - DNA, 26 bp, Homo sapiens
gcccccagccggccacactgcatgtc

SEQ ID NO: 112391 - DNA, 26 bp, Homo sapiens
cccccagccggccacactgcatgtct

SEQ ID NO: 112392 - DNA, 26 bp, Homo sapiens
ccccagccggccacactgcatgtctg

SEQ ID NO: 112393 - DNA, 26 bp, Homo sapiens
cccagccggccacactgcatgtctgc

SEQ ID NO: 112394 - DNA, 26 bp, Homo sapiens
ccagccggccacactgcatgtctgcc

SEQ ID NO: 112395 - DNA, 26 bp, Homo sapiens
cagccggccacactgcatgtctgccc

SEQ ID NO: 112396 - DNA, 26 bp, Homo sapiens
agccggccacactgcatgtctgccct

SEQ ID NO: 112397 - DNA, 26 bp, Homo sapiens
gccggccacactgcatgtctgccctg

SEQ ID NO: 112398 - DNA, 26 bp, Homo sapiens
ccggccacactgcatgtctgccctgg

SEQ ID NO: 112399 - DNA, 26 bp, Homo sapiens
cggccacactgcatgtctgccctggc

SEQ ID NO: 112400 - DNA, 26 bp, Homo sapiens
ggccacactgcatgtctgccctggct

SEQ ID NO: 112401 - DNA, 26 bp, Homo sapiens
gccacactgcatgtctgccctggctt

SEQ ID NO: 112402 - DNA, 26 bp, Homo sapiens
ccacactgcatgtctgccctggcttc

SEQ ID NO: 112403 - DNA, 26 bp, Homo sapiens
cacactgcatgtctgccctggcttca

SEQ ID NO: 112404 - DNA, 26 bp, Homo sapiens
acactgcatgtctgccctggcttcac

SEQ ID NO: 112405 - DNA, 26 bp, Homo sapiens
cactgcatgtctgccctggcttcacc

SEQ ID NO: 112406 - DNA, 26 bp, Homo sapiens
actgcatgtctgccctggcttcacct

SEQ ID NO: 112407 - DNA, 26 bp, Homo sapiens
ctgcatgtctgccctggcttcacctg

SEQ ID NO: 112408 - DNA, 26 bp, Homo sapiens
tgcatgtctgccctggcttcacctgg

SEQ ID NO: 112409 - DNA, 26 bp, Homo sapiens
gcatgtctgccctggcttcacctggg

SEQ ID NO: 112410 - DNA, 26 bp, Homo sapiens
catgtctgccctggcttcacctgggc

SEQ ID NO: 112411 - DNA, 26 bp, Homo sapiens
atgtctgccctggcttcacctgggcc

SEQ ID NO: 112412 - DNA, 26 bp, Homo sapiens
tgtctgccctggcttcacctgggcct

SEQ ID NO: 112413 - DNA, 26 bp, Homo sapiens
gtctgccctggcttcacctgggcctt

SEQ ID NO: 112414 - DNA, 26 bp, Homo sapiens
tctgccctggcttcacctgggccttg

SEQ ID NO: 112415 - DNA, 26 bp, Homo sapiens
ctgccctggcttcacctgggccttgt

SEQ ID NO: 112416 - DNA, 26 bp, Homo sapiens
tgccctggcttcacctgggccttgtt

SEQ ID NO: 112417 - DNA, 26 bp, Homo sapiens
gccctggcttcacctgggccttgttg

SEQ ID NO: 112418 - DNA, 26 bp, Homo sapiens
ccctggcttcacctgggccttgttgc

SEQ ID NO: 112419 - DNA, 26 bp, Homo sapiens
cctggcttcacctgggccttgttgct

SEQ ID NO: 112420 - DNA, 26 bp, Homo sapiens
ctggcttcacctgggccttgttgcta

SEQ ID NO: 112421 - DNA, 26 bp, Homo sapiens
tggcttcacctgggccttgttgctag

SEQ ID NO: 112422 - DNA, 26 bp, Homo sapiens
ggcttcacctgggccttgttgctagg

SEQ ID NO: 112423 - DNA, 26 bp, Homo sapiens
gcttcacctgggccttgttgctaggt

SEQ ID NO: 112424 - DNA, 26 bp, Homo sapiens
cttcacctgggccttgttgctaggta

SEQ ID NO: 112425 - DNA, 26 bp, Homo sapiens
ttcacctgggccttgttgctaggtag

SEQ ID NO: 112426 - DNA, 26 bp, Homo sapiens
tcacctgggccttgttgctaggtagc

SEQ ID NO: 112427 - DNA, 26 bp, Homo sapiens
cacctgggccttgttgctaggtagcc

SEQ ID NO: 112428 - DNA, 26 bp, Homo sapiens
acctgggccttgttgctaggtagcct

SEQ ID NO: 112429 - DNA, 26 bp, Homo sapiens
cctgggccttgttgctaggtagcctg

SEQ ID NO: 112430 - DNA, 26 bp, Homo sapiens
ctgggccttgttgctaggtagcctga

SEQ ID NO: 112431 - DNA, 26 bp, Homo sapiens
tgggccttgttgctaggtagcctgag

SEQ ID NO: 112432 - DNA, 26 bp, Homo sapiens
gggccttgttgctaggtagcctgagg

SEQ ID NO: 112433 - DNA, 26 bp, Homo sapiens
ggccttgttgctaggtagcctgaggg

SEQ ID NO: 112434 - DNA, 26 bp, Homo sapiens
gccttgttgctaggtagcctgagggg

SEQ ID NO: 112435 - DNA, 26 bp, Homo sapiens
ccttgttgctaggtagcctgaggggc

SEQ ID NO: 112436 - DNA, 26 bp, Homo sapiens
cttgttgctaggtagcctgaggggct

SEQ ID NO: 112437 - DNA, 26 bp, Homo sapiens
ttgttgctaggtagcctgaggggctg

SEQ ID NO: 112438 - DNA, 26 bp, Homo sapiens
tgttgctaggtagcctgaggggctgc

SEQ ID NO: 112439 - DNA, 26 bp, Homo sapiens
gttgctaggtagcctgaggggctgca

SEQ ID NO: 112440 - DNA, 26 bp, Homo sapiens
ttgctaggtagcctgaggggctgcac

SEQ ID NO: 112441 - DNA, 26 bp, Homo sapiens
tgctaggtagcctgaggggctgcaca

SEQ ID NO: 112442 - DNA, 26 bp, Homo sapiens
gctaggtagcctgaggggctgcacag

SEQ ID NO: 112443 - DNA, 26 bp, Homo sapiens
ctaggtagcctgaggggctgcacagc

SEQ ID NO: 112444 - DNA, 26 bp, Homo sapiens
taggtagcctgaggggctgcacagct

SEQ ID NO: 112445 - DNA, 26 bp, Homo sapiens
aggtagcctgaggggctgcacagctc

SEQ ID NO: 112446 - DNA, 26 bp, Homo sapiens
ggtagcctgaggggctgcacagctct

SEQ ID NO: 112447 - DNA, 26 bp, Homo sapiens
gtagcctgaggggctgcacagctctg

SEQ ID NO: 112448 - DNA, 26 bp, Homo sapiens
tagcctgaggggctgcacagctctgg

SEQ ID NO: 112449 - DNA, 26 bp, Homo sapiens
agcctgaggggctgcacagctctggt

SEQ ID NO: 112450 - DNA, 26 bp, Homo sapiens
gcctgaggggctgcacagctctggtc

SEQ ID NO: 112451 - DNA, 26 bp, Homo sapiens
cctgaggggctgcacagctctggtcc

SEQ ID NO: 112452 - DNA, 26 bp, Homo sapiens
ctgaggggctgcacagctctggtccg

SEQ ID NO: 112453 - DNA, 26 bp, Homo sapiens
tgaggggctgcacagctctggtccgc

SEQ ID NO: 112454 - DNA, 26 bp, Homo sapiens
gaggggctgcacagctctggtccgct

SEQ ID NO: 112455 - DNA, 26 bp, Homo sapiens
aggggctgcacagctctggtccgctt

SEQ ID NO: 112456 - DNA, 26 bp, Homo sapiens
ggggctgcacagctctggtccgcttg

SEQ ID NO: 112457 - DNA, 26 bp, Homo sapiens
gggctgcacagctctggtccgcttgg

SEQ ID NO: 112458 - DNA, 26 bp, Homo sapiens
ggctgcacagctctggtccgcttggc

SEQ ID NO: 112459 - DNA, 26 bp, Homo sapiens
gctgcacagctctggtccgcttggcc

SEQ ID NO: 112460 - DNA, 26 bp, Homo sapiens
ctgcacagctctggtccgcttggcct

SEQ ID NO: 112461 - DNA, 26 bp, Homo sapiens
tgcacagctctggtccgcttggcctt

SEQ ID NO: 112462 - DNA, 26 bp, Homo sapiens
gcacagctctggtccgcttggccttt

SEQ ID NO: 112463 - DNA, 26 bp, Homo sapiens
cacagctctggtccgcttggcctttc

SEQ ID NO: 112464 - DNA, 26 bp, Homo sapiens
acagctctggtccgcttggcctttct

SEQ ID NO: 112465 - DNA, 26 bp, Homo sapiens
cagctctggtccgcttggcctttctc

SEQ ID NO: 112466 - DNA, 26 bp, Homo sapiens
agctctggtccgcttggcctttctct

SEQ ID NO: 112467 - DNA, 26 bp, Homo sapiens
gctctggtccgcttggcctttctctc

SEQ ID NO: 112468 - DNA, 26 bp, Homo sapiens
ctctggtccgcttggcctttctctcc

SEQ ID NO: 112469 - DNA, 26 bp, Homo sapiens
tctggtccgcttggcctttctctcca

SEQ ID NO: 112470 - DNA, 26 bp, Homo sapiens
ctggtccgcttggcctttctctccag

SEQ ID NO: 112471 - DNA, 26 bp, Homo sapiens
tggtccgcttggcctttctctccagc

SEQ ID NO: 112472 - DNA, 26 bp, Homo sapiens
ggtccgcttggcctttctctccagct

SEQ ID NO: 112473 - DNA, 26 bp, Homo sapiens
gtccgcttggcctttctctccagctg

SEQ ID NO: 112474 - DNA, 26 bp, Homo sapiens
tccgcttggcctttctctccagctgc

SEQ ID NO: 112475 - DNA, 26 bp, Homo sapiens
ccgcttggcctttctctccagctgca

SEQ ID NO: 112476 - DNA, 26 bp, Homo sapiens
cgcttggcctttctctccagctgcag

SEQ ID NO: 112477 - DNA, 26 bp, Homo sapiens
gcttggcctttctctccagctgcagt

SEQ ID NO: 112478 - DNA, 26 bp, Homo sapiens
cttggcctttctctccagctgcagta

SEQ ID NO: 112479 - DNA, 26 bp, Homo sapiens
ttggcctttctctccagctgcagtag

SEQ ID NO: 112480 - DNA, 26 bp, Homo sapiens
tggcctttctctccagctgcagtagc

SEQ ID NO: 112481 - DNA, 26 bp, Homo sapiens
ggcctttctctccagctgcagtagca

SEQ ID NO: 112482 - DNA, 26 bp, Homo sapiens
gcctttctctccagctgcagtagcat

SEQ ID NO: 112483 - DNA, 26 bp, Homo sapiens
cctttctctccagctgcagtagcatg

SEQ ID NO: 112484 - DNA, 26 bp, Homo sapiens
ctttctctccagctgcagtagcatga

SEQ ID NO: 112485 - DNA, 26 bp, Homo sapiens
tttctctccagctgcagtagcatgat

SEQ ID NO: 112486 - DNA, 26 bp, Homo sapiens
ttctctccagctgcagtagcatgatg

SEQ ID NO: 112487 - DNA, 26 bp, Homo sapiens
tctctccagctgcagtagcatgatgt

SEQ ID NO: 112488 - DNA, 26 bp, Homo sapiens
ctctccagctgcagtagcatgatgtc

SEQ ID NO: 112489 - DNA, 26 bp, Homo sapiens
tctccagctgcagtagcatgatgtcg

SEQ ID NO: 112490 - DNA, 26 bp, Homo sapiens
ctccagctgcagtagcatgatgtcgt

SEQ ID NO: 112491 - DNA, 26 bp, Homo sapiens
tccagctgcagtagcatgatgtcgtt

SEQ ID NO: 112492 - DNA, 26 bp, Homo sapiens
ccagctgcagtagcatgatgtcgttg

SEQ ID NO: 112493 - DNA, 26 bp, Homo sapiens
cagctgcagtagcatgatgtcgttgg

SEQ ID NO: 112494 - DNA, 26 bp, Homo sapiens
agctgcagtagcatgatgtcgttgga

SEQ ID NO: 112495 - DNA, 26 bp, Homo sapiens
gctgcagtagcatgatgtcgttggag

SEQ ID NO: 112496 - DNA, 26 bp, Homo sapiens
ctgcagtagcatgatgtcgttggaga

SEQ ID NO: 112497 - DNA, 26 bp, Homo sapiens
tgcagtagcatgatgtcgttggagaa

SEQ ID NO: 112498 - DNA, 26 bp, Homo sapiens
gcagtagcatgatgtcgttggagaag

SEQ ID NO: 112499 - DNA, 26 bp, Homo sapiens
cagtagcatgatgtcgttggagaagt

SEQ ID NO: 112500 - DNA, 26 bp, Homo sapiens
agtagcatgatgtcgttggagaagtt

SEQ ID NO: 112501 - DNA, 26 bp, Homo sapiens
gtagcatgatgtcgttggagaagttc

SEQ ID NO: 112502 - DNA, 26 bp, Homo sapiens
tagcatgatgtcgttggagaagttct

SEQ ID NO: 112503 - DNA, 26 bp, Homo sapiens
agcatgatgtcgttggagaagttctt

SEQ ID NO: 112504 - DNA, 26 bp, Homo sapiens
gcatgatgtcgttggagaagttctta

SEQ ID NO: 112505 - DNA, 26 bp, Homo sapiens
catgatgtcgttggagaagttcttag

SEQ ID NO: 112506 - DNA, 26 bp, Homo sapiens
atgatgtcgttggagaagttcttagg

SEQ ID NO: 112507 - DNA, 26 bp, Homo sapiens
tgatgtcgttggagaagttcttagga

SEQ ID NO: 112508 - DNA, 26 bp, Homo sapiens
gatgtcgttggagaagttcttaggat

SEQ ID NO: 112509 - DNA, 26 bp, Homo sapiens
atgtcgttggagaagttcttaggatt

SEQ ID NO: 112510 - DNA, 26 bp, Homo sapiens
tgtcgttggagaagttcttaggatta

SEQ ID NO: 112511 - DNA, 26 bp, Homo sapiens
gtcgttggagaagttcttaggattat

SEQ ID NO: 112512 - DNA, 26 bp, Homo sapiens
tcgttggagaagttcttaggattata

SEQ ID NO: 112513 - DNA, 26 bp, Homo sapiens
cgttggagaagttcttaggattatag

SEQ ID NO: 112514 - DNA, 26 bp, Homo sapiens
gttggagaagttcttaggattatagg

SEQ ID NO: 112515 - DNA, 26 bp, Homo sapiens
ttggagaagttcttaggattataggc

SEQ ID NO: 112516 - DNA, 26 bp, Homo sapiens
tggagaagttcttaggattataggct

SEQ ID NO: 112517 - DNA, 26 bp, Homo sapiens
ggagaagttcttaggattataggctg

SEQ ID NO: 112518 - DNA, 26 bp, Homo sapiens
gagaagttcttaggattataggctgg

SEQ ID NO: 112519 - DNA, 26 bp, Homo sapiens
agaagttcttaggattataggctgga

SEQ ID NO: 112520 - DNA, 26 bp, Homo sapiens
gaagttcttaggattataggctggat

SEQ ID NO: 112521 - DNA, 26 bp, Homo sapiens
aagttcttaggattataggctggatg

SEQ ID NO: 112522 - DNA, 26 bp, Homo sapiens
agttcttaggattataggctggatgg

SEQ ID NO: 112523 - DNA, 26 bp, Homo sapiens
gttcttaggattataggctggatggg

SEQ ID NO: 112524 - DNA, 26 bp, Homo sapiens
ttcttaggattataggctggatgggg

SEQ ID NO: 112525 - DNA, 26 bp, Homo sapiens
tcttaggattataggctggatggggg

SEQ ID NO: 112526 - DNA, 26 bp, Homo sapiens
cttaggattataggctggatggggga

SEQ ID NO: 112527 - DNA, 26 bp, Homo sapiens
ttaggattataggctggatgggggat

SEQ ID NO: 112528 - DNA, 26 bp, Homo sapiens
taggattataggctggatgggggatg

SEQ ID NO: 112529 - DNA, 26 bp, Homo sapiens
aggattataggctggatgggggatgg

SEQ ID NO: 112530 - DNA, 26 bp, Homo sapiens
ggattataggctggatgggggatggg

SEQ ID NO: 112531 - DNA, 26 bp, Homo sapiens
gattataggctggatgggggatgggt

SEQ ID NO: 112532 - DNA, 26 bp, Homo sapiens
attataggctggatgggggatgggtc

SEQ ID NO: 112533 - DNA, 26 bp, Homo sapiens
ttataggctggatgggggatgggtct

SEQ ID NO: 112534 - DNA, 26 bp, Homo sapiens
tataggctggatgggggatgggtctt

SEQ ID NO: 112535 - DNA, 26 bp, Homo sapiens
ataggctggatgggggatgggtcttt

SEQ ID NO: 112536 - DNA, 26 bp, Homo sapiens
taggctggatgggggatgggtctttt

SEQ ID NO: 112537 - DNA, 26 bp, Homo sapiens
aggctggatgggggatgggtcttttc

SEQ ID NO: 112538 - DNA, 26 bp, Homo sapiens
ggctggatgggggatgggtcttttca

SEQ ID NO: 112539 - DNA, 26 bp, Homo sapiens
gctggatgggggatgggtcttttcac

SEQ ID NO: 112540 - DNA, 26 bp, Homo sapiens
ctggatgggggatgggtcttttcaca

SEQ ID NO: 112541 - DNA, 26 bp, Homo sapiens
tggatgggggatgggtcttttcacag

SEQ ID NO: 112542 - DNA, 26 bp, Homo sapiens
ggatgggggatgggtcttttcacagg

SEQ ID NO: 112543 - DNA, 26 bp, Homo sapiens
gatgggggatgggtcttttcacaggg

SEQ ID NO: 112544 - DNA, 26 bp, Homo sapiens
atgggggatgggtcttttcacaggga

SEQ ID NO: 112545 - DNA, 26 bp, Homo sapiens
tgggggatgggtcttttcacagggat

SEQ ID NO: 112546 - DNA, 26 bp, Homo sapiens
gggggatgggtcttttcacagggata

SEQ ID NO: 112547 - DNA, 26 bp, Homo sapiens
ggggatgggtcttttcacagggataa

SEQ ID NO: 112548 - DNA, 26 bp, Homo sapiens
gggatgggtcttttcacagggataaa

SEQ ID NO: 112549 - DNA, 26 bp, Homo sapiens
ggatgggtcttttcacagggataaac

SEQ ID NO: 112550 - DNA, 26 bp, Homo sapiens
gatgggtcttttcacagggataaact

SEQ ID NO: 112551 - DNA, 26 bp, Homo sapiens
atgggtcttttcacagggataaactg

SEQ ID NO: 112552 - DNA, 26 bp, Homo sapiens
tgggtcttttcacagggataaactgc

SEQ ID NO: 112553 - DNA, 26 bp, Homo sapiens
gggtcttttcacagggataaactgct

SEQ ID NO: 112554 - DNA, 26 bp, Homo sapiens
ggtcttttcacagggataaactgctg

SEQ ID NO: 112555 - DNA, 26 bp, Homo sapiens
gtcttttcacagggataaactgctgg

SEQ ID NO: 112556 - DNA, 26 bp, Homo sapiens
tcttttcacagggataaactgctggg

SEQ ID NO: 112557 - DNA, 26 bp, Homo sapiens
cttttcacagggataaactgctgggt

SEQ ID NO: 112558 - DNA, 26 bp, Homo sapiens
ttttcacagggataaactgctgggtc

SEQ ID NO: 112559 - DNA, 26 bp, Homo sapiens
tttcacagggataaactgctgggtcg

SEQ ID NO: 112560 - DNA, 26 bp, Homo sapiens
ttcacagggataaactgctgggtcgg

SEQ ID NO: 112561 - DNA, 26 bp, Homo sapiens
tcacagggataaactgctgggtcggc

SEQ ID NO: 112562 - DNA, 26 bp, Homo sapiens
cacagggataaactgctgggtcggct

SEQ ID NO: 112563 - DNA, 26 bp, Homo sapiens
acagggataaactgctgggtcggctc

SEQ ID NO: 112564 - DNA, 26 bp, Homo sapiens
cagggataaactgctgggtcggctcc

SEQ ID NO: 112565 - DNA, 26 bp, Homo sapiens
agggataaactgctgggtcggctcct

SEQ ID NO: 112566 - DNA, 26 bp, Homo sapiens
gggataaactgctgggtcggctcctg

SEQ ID NO: 112567 - DNA, 26 bp, Homo sapiens
ggataaactgctgggtcggctcctgt

SEQ ID NO: 112568 - DNA, 26 bp, Homo sapiens
gataaactgctgggtcggctcctgtt

SEQ ID NO: 112569 - DNA, 26 bp, Homo sapiens
ataaactgctgggtcggctcctgttc

SEQ ID NO: 112570 - DNA, 26 bp, Homo sapiens
taaactgctgggtcggctcctgttct

SEQ ID NO: 112571 - DNA, 26 bp, Homo sapiens
aaactgctgggtcggctcctgttctt

SEQ ID NO: 112572 - DNA, 26 bp, Homo sapiens
aactgctgggtcggctcctgttcttt

SEQ ID NO: 112573 - DNA, 26 bp, Homo sapiens
actgctgggtcggctcctgttctttg

SEQ ID NO: 112574 - DNA, 26 bp, Homo sapiens
ctgctgggtcggctcctgttctttga

SEQ ID NO: 112575 - DNA, 26 bp, Homo sapiens
tgctgggtcggctcctgttctttgat

SEQ ID NO: 112576 - DNA, 26 bp, Homo sapiens
gctgggtcggctcctgttctttgata

SEQ ID NO: 112577 - DNA, 26 bp, Homo sapiens
ctgggtcggctcctgttctttgatat

SEQ ID NO: 112578 - DNA, 26 bp, Homo sapiens
tgggtcggctcctgttctttgatatt

SEQ ID NO: 112579 - DNA, 26 bp, Homo sapiens
gggtcggctcctgttctttgatattg

SEQ ID NO: 112580 - DNA, 26 bp, Homo sapiens
ggtcggctcctgttctttgatattgt

SEQ ID NO: 112581 - DNA, 26 bp, Homo sapiens
gtcggctcctgttctttgatattgtg

SEQ ID NO: 112582 - DNA, 26 bp, Homo sapiens
tcggctcctgttctttgatattgtgg

SEQ ID NO: 112583 - DNA, 26 bp, Homo sapiens
cggctcctgttctttgatattgtggg

SEQ ID NO: 112584 - DNA, 26 bp, Homo sapiens
ggctcctgttctttgatattgtgggc

SEQ ID NO: 112585 - DNA, 26 bp, Homo sapiens
gctcctgttctttgatattgtgggcc

SEQ ID NO: 112586 - DNA, 26 bp, Homo sapiens
ctcctgttctttgatattgtgggccc

SEQ ID NO: 112587 - DNA, 26 bp, Homo sapiens
tcctgttctttgatattgtgggcccc

SEQ ID NO: 112588 - DNA, 26 bp, Homo sapiens
cctgttctttgatattgtgggccccc

SEQ ID NO: 112589 - DNA, 26 bp, Homo sapiens
ctgttctttgatattgtgggccccca

SEQ ID NO: 112590 - DNA, 26 bp, Homo sapiens
tgttctttgatattgtgggcccccaa

SEQ ID NO: 112591 - DNA, 26 bp, Homo sapiens
gttctttgatattgtgggcccccaag

SEQ ID NO: 112592 - DNA, 26 bp, Homo sapiens
ttctttgatattgtgggcccccaagg

SEQ ID NO: 112593 - DNA, 26 bp, Homo sapiens
tctttgatattgtgggcccccaaggt

SEQ ID NO: 112594 - DNA, 26 bp, Homo sapiens
ctttgatattgtgggcccccaaggtg

SEQ ID NO: 112595 - DNA, 26 bp, Homo sapiens
tttgatattgtgggcccccaaggtga

SEQ ID NO: 112596 - DNA, 26 bp, Homo sapiens
ttgatattgtgggcccccaaggtgac

SEQ ID NO: 112597 - DNA, 26 bp, Homo sapiens
tgatattgtgggcccccaaggtgaca

SEQ ID NO: 112598 - DNA, 26 bp, Homo sapiens
gatattgtgggcccccaaggtgacat

SEQ ID NO: 112599 - DNA, 26 bp, Homo sapiens
atattgtgggcccccaaggtgacatt

SEQ ID NO: 112600 - DNA, 26 bp, Homo sapiens
tattgtgggcccccaaggtgacattt

SEQ ID NO: 112601 - DNA, 26 bp, Homo sapiens
attgtgggcccccaaggtgacattta

SEQ ID NO: 112602 - DNA, 26 bp, Homo sapiens
ttgtgggcccccaaggtgacatttat

SEQ ID NO: 112603 - DNA, 26 bp, Homo sapiens
tgtgggcccccaaggtgacatttatg

SEQ ID NO: 112604 - DNA, 26 bp, Homo sapiens
gtgggcccccaaggtgacatttatgg

SEQ ID NO: 112605 - DNA, 26 bp, Homo sapiens
tgggcccccaaggtgacatttatgga

SEQ ID NO: 112606 - DNA, 26 bp, Homo sapiens
gggcccccaaggtgacatttatggag

SEQ ID NO: 112607 - DNA, 26 bp, Homo sapiens
ggcccccaaggtgacatttatggagc

SEQ ID NO: 112608 - DNA, 26 bp, Homo sapiens
gcccccaaggtgacatttatggagct

SEQ ID NO: 112609 - DNA, 26 bp, Homo sapiens
cccccaaggtgacatttatggagctt

SEQ ID NO: 112610 - DNA, 26 bp, Homo sapiens
ccccaaggtgacatttatggagcttc

SEQ ID NO: 112611 - DNA, 26 bp, Homo sapiens
cccaaggtgacatttatggagcttcc

SEQ ID NO: 112612 - DNA, 26 bp, Homo sapiens
ccaaggtgacatttatggagcttccc

SEQ ID NO: 112613 - DNA, 26 bp, Homo sapiens
caaggtgacatttatggagcttcccc

SEQ ID NO: 112614 - DNA, 26 bp, Homo sapiens
aaggtgacatttatggagcttcccca

SEQ ID NO: 112615 - DNA, 26 bp, Homo sapiens
aggtgacatttatggagcttccccaa

SEQ ID NO: 112616 - DNA, 26 bp, Homo sapiens
ggtgacatttatggagcttccccaac

SEQ ID NO: 112617 - DNA, 26 bp, Homo sapiens
gtgacatttatggagcttccccaaca

SEQ ID NO: 112618 - DNA, 26 bp, Homo sapiens
tgacatttatggagcttccccaacag

SEQ ID NO: 112619 - DNA, 26 bp, Homo sapiens
gacatttatggagcttccccaacagt

SEQ ID NO: 112620 - DNA, 26 bp, Homo sapiens
acatttatggagcttccccaacagtg

SEQ ID NO: 112621 - DNA, 26 bp, Homo sapiens
catttatggagcttccccaacagtga

SEQ ID NO: 112622 - DNA, 26 bp, Homo sapiens
atttatggagcttccccaacagtgag

SEQ ID NO: 112623 - DNA, 26 bp, Homo sapiens
tttatggagcttccccaacagtgagc

SEQ ID NO: 112624 - DNA, 26 bp, Homo sapiens
ttatggagcttccccaacagtgagca

SEQ ID NO: 112625 - DNA, 26 bp, Homo sapiens
tatggagcttccccaacagtgagcag

SEQ ID NO: 112626 - DNA, 26 bp, Homo sapiens
atggagcttccccaacagtgagcagc

SEQ ID NO: 112627 - DNA, 26 bp, Homo sapiens
tggagcttccccaacagtgagcagct

SEQ ID NO: 112628 - DNA, 26 bp, Homo sapiens
ggagcttccccaacagtgagcagctg

SEQ ID NO: 112629 - DNA, 26 bp, Homo sapiens
gagcttccccaacagtgagcagctgt

SEQ ID NO: 112630 - DNA, 26 bp, Homo sapiens
agcttccccaacagtgagcagctgtc

SEQ ID NO: 112631 - DNA, 26 bp, Homo sapiens
gcttccccaacagtgagcagctgtca

SEQ ID NO: 112632 - DNA, 26 bp, Homo sapiens
cttccccaacagtgagcagctgtcag

SEQ ID NO: 112633 - DNA, 26 bp, Homo sapiens
ttccccaacagtgagcagctgtcagc

SEQ ID NO: 112634 - DNA, 26 bp, Homo sapiens
tccccaacagtgagcagctgtcagca

SEQ ID NO: 112635 - DNA, 26 bp, Homo sapiens
ccccaacagtgagcagctgtcagcac

SEQ ID NO: 112636 - DNA, 26 bp, Homo sapiens
cccaacagtgagcagctgtcagcacg

SEQ ID NO: 112637 - DNA, 26 bp, Homo sapiens
ccaacagtgagcagctgtcagcacga

SEQ ID NO: 112638 - DNA, 26 bp, Homo sapiens
caacagtgagcagctgtcagcacgaa

SEQ ID NO: 112639 - DNA, 26 bp, Homo sapiens
aacagtgagcagctgtcagcacgaag

SEQ ID NO: 112640 - DNA, 26 bp, Homo sapiens
acagtgagcagctgtcagcacgaagt

SEQ ID NO: 112641 - DNA, 26 bp, Homo sapiens
cagtgagcagctgtcagcacgaagtc

SEQ ID NO: 112642 - DNA, 26 bp, Homo sapiens
agtgagcagctgtcagcacgaagtcg

SEQ ID NO: 112643 - DNA, 26 bp, Homo sapiens
gtgagcagctgtcagcacgaagtcgt

SEQ ID NO: 112644 - DNA, 26 bp, Homo sapiens
tgagcagctgtcagcacgaagtcgtc

SEQ ID NO: 112645 - DNA, 26 bp, Homo sapiens
gagcagctgtcagcacgaagtcgtct

SEQ ID NO: 112646 - DNA, 26 bp, Homo sapiens
agcagctgtcagcacgaagtcgtctc

SEQ ID NO: 112647 - DNA, 26 bp, Homo sapiens
gcagctgtcagcacgaagtcgtctcg

SEQ ID NO: 112648 - DNA, 26 bp, Homo sapiens
cagctgtcagcacgaagtcgtctcgt

SEQ ID NO: 112649 - DNA, 26 bp, Homo sapiens
agctgtcagcacgaagtcgtctcgta

SEQ ID NO: 112650 - DNA, 26 bp, Homo sapiens
gctgtcagcacgaagtcgtctcgtat

SEQ ID NO: 112651 - DNA, 26 bp, Homo sapiens
ctgtcagcacgaagtcgtctcgtatc

SEQ ID NO: 112652 - DNA, 26 bp, Homo sapiens
tgtcagcacgaagtcgtctcgtatca

SEQ ID NO: 112653 - DNA, 26 bp, Homo sapiens
gtcagcacgaagtcgtctcgtatcag

SEQ ID NO: 112654 - DNA, 26 bp, Homo sapiens
tcagcacgaagtcgtctcgtatcagg

SEQ ID NO: 112655 - DNA, 26 bp, Homo sapiens
cagcacgaagtcgtctcgtatcagga

SEQ ID NO: 112656 - DNA, 26 bp, Homo sapiens
agcacgaagtcgtctcgtatcaggaa

SEQ ID NO: 112657 - DNA, 26 bp, Homo sapiens
gcacgaagtcgtctcgtatcaggaag

SEQ ID NO: 112658 - DNA, 26 bp, Homo sapiens
cacgaagtcgtctcgtatcaggaagc

SEQ ID NO: 112659 - DNA, 26 bp, Homo sapiens
acgaagtcgtctcgtatcaggaagcc

SEQ ID NO: 112660 - DNA, 26 bp, Homo sapiens
cgaagtcgtctcgtatcaggaagcca

SEQ ID NO: 112661 - DNA, 26 bp, Homo sapiens
gaagtcgtctcgtatcaggaagccac

SEQ ID NO: 112662 - DNA, 26 bp, Homo sapiens
aagtcgtctcgtatcaggaagccacc

SEQ ID NO: 112663 - DNA, 26 bp, Homo sapiens
agtcgtctcgtatcaggaagccaccg

SEQ ID NO: 112664 - DNA, 26 bp, Homo sapiens
gtcgtctcgtatcaggaagccaccgc

SEQ ID NO: 112665 - DNA, 26 bp, Homo sapiens
tcgtctcgtatcaggaagccaccgca

SEQ ID NO: 112666 - DNA, 26 bp, Homo sapiens
cgtctcgtatcaggaagccaccgcac

SEQ ID NO: 112667 - DNA, 26 bp, Homo sapiens
gtctcgtatcaggaagccaccgcacc

SEQ ID NO: 112668 - DNA, 26 bp, Homo sapiens
tctcgtatcaggaagccaccgcacct

SEQ ID NO: 112669 - DNA, 26 bp, Homo sapiens
ctcgtatcaggaagccaccgcacctc

SEQ ID NO: 112670 - DNA, 26 bp, Homo sapiens
tcgtatcaggaagccaccgcacctct

SEQ ID NO: 112671 - DNA, 26 bp, Homo sapiens
cgtatcaggaagccaccgcacctctt

SEQ ID NO: 112672 - DNA, 26 bp, Homo sapiens
gtatcaggaagccaccgcacctcttc

SEQ ID NO: 112673 - DNA, 26 bp, Homo sapiens
tatcaggaagccaccgcacctcttca

SEQ ID NO: 112674 - DNA, 26 bp, Homo sapiens
atcaggaagccaccgcacctcttcag

SEQ ID NO: 112675 - DNA, 26 bp, Homo sapiens
tcaggaagccaccgcacctcttcaga

SEQ ID NO: 112676 - DNA, 26 bp, Homo sapiens
caggaagccaccgcacctcttcagag

SEQ ID NO: 112677 - DNA, 26 bp, Homo sapiens
aggaagccaccgcacctcttcagaga

SEQ ID NO: 112678 - DNA, 26 bp, Homo sapiens
ggaagccaccgcacctcttcagagac

SEQ ID NO: 112679 - DNA, 26 bp, Homo sapiens
gaagccaccgcacctcttcagagact

SEQ ID NO: 112680 - DNA, 26 bp, Homo sapiens
aagccaccgcacctcttcagagactt

SEQ ID NO: 112681 - DNA, 26 bp, Homo sapiens
agccaccgcacctcttcagagacttc

SEQ ID NO: 112682 - DNA, 26 bp, Homo sapiens
gccaccgcacctcttcagagacttct

SEQ ID NO: 112683 - DNA, 26 bp, Homo sapiens
ccaccgcacctcttcagagacttctg

SEQ ID NO: 112684 - DNA, 26 bp, Homo sapiens
caccgcacctcttcagagacttctga

SEQ ID NO: 112685 - DNA, 26 bp, Homo sapiens
accgcacctcttcagagacttctgat

SEQ ID NO: 112686 - DNA, 26 bp, Homo sapiens
ccgcacctcttcagagacttctgatc

SEQ ID NO: 112687 - DNA, 26 bp, Homo sapiens
cgcacctcttcagagacttctgatcc

SEQ ID NO: 112688 - DNA, 26 bp, Homo sapiens
gcacctcttcagagacttctgatccc

SEQ ID NO: 112689 - DNA, 26 bp, Homo sapiens
cacctcttcagagacttctgatccca

SEQ ID NO: 112690 - DNA, 26 bp, Homo sapiens
acctcttcagagacttctgatcccag

SEQ ID NO: 112691 - DNA, 26 bp, Homo sapiens
cctcttcagagacttctgatcccaga

SEQ ID NO: 112692 - DNA, 26 bp, Homo sapiens
ctcttcagagacttctgatcccagat

SEQ ID NO: 112693 - DNA, 26 bp, Homo sapiens
tcttcagagacttctgatcccagatc

SEQ ID NO: 112694 - DNA, 26 bp, Homo sapiens
cttcagagacttctgatcccagatca

SEQ ID NO: 112695 - DNA, 26 bp, Homo sapiens
ttcagagacttctgatcccagatcat

SEQ ID NO: 112696 - DNA, 26 bp, Homo sapiens
tcagagacttctgatcccagatcata

SEQ ID NO: 112697 - DNA, 26 bp, Homo sapiens
cagagacttctgatcccagatcataa

SEQ ID NO: 112698 - DNA, 26 bp, Homo sapiens
agagacttctgatcccagatcataag

SEQ ID NO: 112699 - DNA, 26 bp, Homo sapiens
gagacttctgatcccagatcataaga

SEQ ID NO: 112700 - DNA, 26 bp, Homo sapiens
agacttctgatcccagatcataagat

SEQ ID NO: 112701 - DNA, 26 bp, Homo sapiens
gacttctgatcccagatcataagata

SEQ ID NO: 112702 - DNA, 26 bp, Homo sapiens
acttctgatcccagatcataagataa

SEQ ID NO: 112703 - DNA, 26 bp, Homo sapiens
cttctgatcccagatcataagataag

SEQ ID NO: 112704 - DNA, 26 bp, Homo sapiens
ttctgatcccagatcataagataagc

SEQ ID NO: 112705 - DNA, 26 bp, Homo sapiens
tctgatcccagatcataagataagcc

SEQ ID NO: 112706 - DNA, 26 bp, Homo sapiens
ctgatcccagatcataagataagcca

SEQ ID NO: 112707 - DNA, 26 bp, Homo sapiens
tgatcccagatcataagataagccat

SEQ ID NO: 112708 - DNA, 26 bp, Homo sapiens
gatcccagatcataagataagccatg

SEQ ID NO: 112709 - DNA, 26 bp, Homo sapiens
atcccagatcataagataagccatgt

SEQ ID NO: 112710 - DNA, 26 bp, Homo sapiens
tcccagatcataagataagccatgta

SEQ ID NO: 112711 - DNA, 26 bp, Homo sapiens
cccagatcataagataagccatgtag

SEQ ID NO: 112712 - DNA, 26 bp, Homo sapiens
ccagatcataagataagccatgtagg

SEQ ID NO: 112713 - DNA, 26 bp, Homo sapiens
cagatcataagataagccatgtaggg

SEQ ID NO: 112714 - DNA, 26 bp, Homo sapiens
agatcataagataagccatgtagggg

SEQ ID NO: 112715 - DNA, 26 bp, Homo sapiens
gatcataagataagccatgtaggggc

SEQ ID NO: 112716 - DNA, 26 bp, Homo sapiens
atcataagataagccatgtaggggcg

SEQ ID NO: 112717 - DNA, 26 bp, Homo sapiens
tcataagataagccatgtaggggcgg

SEQ ID NO: 112718 - DNA, 26 bp, Homo sapiens
cataagataagccatgtaggggcggg

SEQ ID NO: 112719 - DNA, 26 bp, Homo sapiens
ataagataagccatgtaggggcggga

SEQ ID NO: 112720 - DNA, 26 bp, Homo sapiens
taagataagccatgtaggggcgggag

SEQ ID NO: 112721 - DNA, 26 bp, Homo sapiens
aagataagccatgtaggggcgggagt

SEQ ID NO: 112722 - DNA, 26 bp, Homo sapiens
agataagccatgtaggggcgggagtg

SEQ ID NO: 112723 - DNA, 26 bp, Homo sapiens
gataagccatgtaggggcgggagtgg

SEQ ID NO: 112724 - DNA, 26 bp, Homo sapiens
ataagccatgtaggggcgggagtggg

SEQ ID NO: 112725 - DNA, 26 bp, Homo sapiens
taagccatgtaggggcgggagtgggg

SEQ ID NO: 112726 - DNA, 26 bp, Homo sapiens
aagccatgtaggggcgggagtggggc

SEQ ID NO: 112727 - DNA, 26 bp, Homo sapiens
agccatgtaggggcgggagtggggct

SEQ ID NO: 112728 - DNA, 26 bp, Homo sapiens
gccatgtaggggcgggagtggggctt

SEQ ID NO: 112729 - DNA, 26 bp, Homo sapiens
ccatgtaggggcgggagtggggcttg

SEQ ID NO: 112730 - DNA, 26 bp, Homo sapiens
catgtaggggcgggagtggggcttgg

SEQ ID NO: 112731 - DNA, 26 bp, Homo sapiens
atgtaggggcgggagtggggcttggc

SEQ ID NO: 112732 - DNA, 26 bp, Homo sapiens
tgtaggggcgggagtggggcttggcc

SEQ ID NO: 112733 - DNA, 26 bp, Homo sapiens
gtaggggcgggagtggggcttggcct

SEQ ID NO: 112734 - DNA, 26 bp, Homo sapiens
taggggcgggagtggggcttggcctc

SEQ ID NO: 112735 - DNA, 26 bp, Homo sapiens
aggggcgggagtggggcttggcctca

SEQ ID NO: 112736 - DNA, 26 bp, Homo sapiens
ggggcgggagtggggcttggcctcat

SEQ ID NO: 112737 - DNA, 26 bp, Homo sapiens
gggcgggagtggggcttggcctcatg

SEQ ID NO: 112738 - DNA, 26 bp, Homo sapiens
ggcgggagtggggcttggcctcatgt

SEQ ID NO: 112739 - DNA, 26 bp, Homo sapiens
gcgggagtggggcttggcctcatgtc

SEQ ID NO: 112740 - DNA, 26 bp, Homo sapiens
cgggagtggggcttggcctcatgtcc

SEQ ID NO: 112741 - DNA, 26 bp, Homo sapiens
gggagtggggcttggcctcatgtccc

SEQ ID NO: 112742 - DNA, 26 bp, Homo sapiens
ggagtggggcttggcctcatgtcccc

SEQ ID NO: 112743 - DNA, 26 bp, Homo sapiens
gagtggggcttggcctcatgtccccc

SEQ ID NO: 112744 - DNA, 26 bp, Homo sapiens
agtggggcttggcctcatgtcccccg

SEQ ID NO: 112745 - DNA, 26 bp, Homo sapiens
gtggggcttggcctcatgtcccccga

SEQ ID NO: 112746 - DNA, 26 bp, Homo sapiens
tggggcttggcctcatgtcccccgat

SEQ ID NO: 112747 - DNA, 26 bp, Homo sapiens
ggggcttggcctcatgtcccccgatg

SEQ ID NO: 112748 - DNA, 26 bp, Homo sapiens
gggcttggcctcatgtcccccgatga

SEQ ID NO: 112749 - DNA, 26 bp, Homo sapiens
ggcttggcctcatgtcccccgatgat

SEQ ID NO: 112750 - DNA, 26 bp, Homo sapiens
gcttggcctcatgtcccccgatgatc

SEQ ID NO: 112751 - DNA, 26 bp, Homo sapiens
cttggcctcatgtcccccgatgatct

SEQ ID NO: 112752 - DNA, 26 bp, Homo sapiens
ttggcctcatgtcccccgatgatctc

SEQ ID NO: 112753 - DNA, 26 bp, Homo sapiens
tggcctcatgtcccccgatgatctcc

SEQ ID NO: 112754 - DNA, 26 bp, Homo sapiens
ggcctcatgtcccccgatgatctccc

SEQ ID NO: 112755 - DNA, 26 bp, Homo sapiens
gcctcatgtcccccgatgatctcccc

SEQ ID NO: 112756 - DNA, 26 bp, Homo sapiens
cctcatgtcccccgatgatctcccct

SEQ ID NO: 112757 - DNA, 26 bp, Homo sapiens
ctcatgtcccccgatgatctcccctg

SEQ ID NO: 112758 - DNA, 26 bp, Homo sapiens
tcatgtcccccgatgatctcccctgc

SEQ ID NO: 112759 - DNA, 26 bp, Homo sapiens
catgtcccccgatgatctcccctgca

SEQ ID NO: 112760 - DNA, 26 bp, Homo sapiens
atgtcccccgatgatctcccctgcat

SEQ ID NO: 112761 - DNA, 26 bp, Homo sapiens
tgtcccccgatgatctcccctgcatc

SEQ ID NO: 112762 - DNA, 26 bp, Homo sapiens
gtcccccgatgatctcccctgcatct

SEQ ID NO: 112763 - DNA, 26 bp, Homo sapiens
tcccccgatgatctcccctgcatctg

SEQ ID NO: 112764 - DNA, 26 bp, Homo sapiens
cccccgatgatctcccctgcatctgc

SEQ ID NO: 112765 - DNA, 26 bp, Homo sapiens
ccccgatgatctcccctgcatctgcc

SEQ ID NO: 112766 - DNA, 26 bp, Homo sapiens
cccgatgatctcccctgcatctgccc

SEQ ID NO: 112767 - DNA, 26 bp, Homo sapiens
ccgatgatctcccctgcatctgccct

SEQ ID NO: 112768 - DNA, 26 bp, Homo sapiens
cgatgatctcccctgcatctgccctg

SEQ ID NO: 112769 - DNA, 26 bp, Homo sapiens
gatgatctcccctgcatctgccctgg

SEQ ID NO: 112770 - DNA, 26 bp, Homo sapiens
atgatctcccctgcatctgccctggg

SEQ ID NO: 112771 - DNA, 26 bp, Homo sapiens
tgatctcccctgcatctgccctgggc

SEQ ID NO: 112772 - DNA, 26 bp, Homo sapiens
gatctcccctgcatctgccctgggca

SEQ ID NO: 112773 - DNA, 26 bp, Homo sapiens
atctcccctgcatctgccctgggcag

SEQ ID NO: 112774 - DNA, 26 bp, Homo sapiens
tctcccctgcatctgccctgggcagc

SEQ ID NO: 112775 - DNA, 26 bp, Homo sapiens
ctcccctgcatctgccctgggcagca

SEQ ID NO: 112776 - DNA, 26 bp, Homo sapiens
tcccctgcatctgccctgggcagcag

SEQ ID NO: 112777 - DNA, 26 bp, Homo sapiens
cccctgcatctgccctgggcagcagg

SEQ ID NO: 112778 - DNA, 26 bp, Homo sapiens
ccctgcatctgccctgggcagcagga

SEQ ID NO: 112779 - DNA, 26 bp, Homo sapiens
cctgcatctgccctgggcagcaggag

SEQ ID NO: 112780 - DNA, 26 bp, Homo sapiens
ctgcatctgccctgggcagcaggagg

SEQ ID NO: 112781 - DNA, 26 bp, Homo sapiens
tgcatctgccctgggcagcaggagga

SEQ ID NO: 112782 - DNA, 26 bp, Homo sapiens
gcatctgccctgggcagcaggaggaa

SEQ ID NO: 112783 - DNA, 26 bp, Homo sapiens
catctgccctgggcagcaggaggaag

SEQ ID NO: 112784 - DNA, 26 bp, Homo sapiens
atctgccctgggcagcaggaggaagg

SEQ ID NO: 112785 - DNA, 26 bp, Homo sapiens
tctgccctgggcagcaggaggaaggc

SEQ ID NO: 112786 - DNA, 26 bp, Homo sapiens
ctgccctgggcagcaggaggaaggcc

SEQ ID NO: 112787 - DNA, 26 bp, Homo sapiens
tgccctgggcagcaggaggaaggcca

SEQ ID NO: 112788 - DNA, 26 bp, Homo sapiens
gccctgggcagcaggaggaaggccag

SEQ ID NO: 112789 - DNA, 26 bp, Homo sapiens
ccctgggcagcaggaggaaggccagc

SEQ ID NO: 112790 - DNA, 26 bp, Homo sapiens
cctgggcagcaggaggaaggccagca

SEQ ID NO: 112791 - DNA, 26 bp, Homo sapiens
ctgggcagcaggaggaaggccagcag

SEQ ID NO: 112792 - DNA, 26 bp, Homo sapiens
tgggcagcaggaggaaggccagcaga

SEQ ID NO: 112793 - DNA, 26 bp, Homo sapiens
gggcagcaggaggaaggccagcagaa

SEQ ID NO: 112794 - DNA, 26 bp, Homo sapiens
ggcagcaggaggaaggccagcagaag

SEQ ID NO: 112795 - DNA, 26 bp, Homo sapiens
gcagcaggaggaaggccagcagaagc

SEQ ID NO: 112796 - DNA, 26 bp, Homo sapiens
cagcaggaggaaggccagcagaagca

SEQ ID NO: 112797 - DNA, 26 bp, Homo sapiens
agcaggaggaaggccagcagaagcag

SEQ ID NO: 112798 - DNA, 26 bp, Homo sapiens
gcaggaggaaggccagcagaagcagg

SEQ ID NO: 112799 - DNA, 26 bp, Homo sapiens
caggaggaaggccagcagaagcagga

SEQ ID NO: 112800 - DNA, 26 bp, Homo sapiens
aggaggaaggccagcagaagcaggat

SEQ ID NO: 112801 - DNA, 26 bp, Homo sapiens
ggaggaaggccagcagaagcaggatt

SEQ ID NO: 112802 - DNA, 26 bp, Homo sapiens
gaggaaggccagcagaagcaggattg

SEQ ID NO: 112803 - DNA, 26 bp, Homo sapiens
aggaaggccagcagaagcaggattgg

SEQ ID NO: 112804 - DNA, 26 bp, Homo sapiens
ggaaggccagcagaagcaggattggt

SEQ ID NO: 112805 - DNA, 26 bp, Homo sapiens
gaaggccagcagaagcaggattggtt

SEQ ID NO: 112806 - DNA, 26 bp, Homo sapiens
aaggccagcagaagcaggattggttg

SEQ ID NO: 112807 - DNA, 26 bp, Homo sapiens
aggccagcagaagcaggattggttgc

SEQ ID NO: 112808 - DNA, 26 bp, Homo sapiens
ggccagcagaagcaggattggttgca

SEQ ID NO: 112809 - DNA, 26 bp, Homo sapiens
gccagcagaagcaggattggttgcat

SEQ ID NO: 112810 - DNA, 26 bp, Homo sapiens
ccagcagaagcaggattggttgcatc

SEQ ID NO: 112811 - DNA, 26 bp, Homo sapiens
cagcagaagcaggattggttgcatct

SEQ ID NO: 112812 - DNA, 26 bp, Homo sapiens
agcagaagcaggattggttgcatctt

SEQ ID NO: 112813 - DNA, 26 bp, Homo sapiens
gcagaagcaggattggttgcatcttc

SEQ ID NO: 112814 - DNA, 26 bp, Homo sapiens
cagaagcaggattggttgcatcttct

SEQ ID NO: 112815 - DNA, 26 bp, Homo sapiens
agaagcaggattggttgcatcttctc

SEQ ID NO: 112816 - DNA, 26 bp, Homo sapiens
gaagcaggattggttgcatcttctca

SEQ ID NO: 112817 - DNA, 26 bp, Homo sapiens
aagcaggattggttgcatcttctcag

SEQ ID NO: 112818 - DNA, 26 bp, Homo sapiens
agcaggattggttgcatcttctcagg

SEQ ID NO: 112819 - DNA, 26 bp, Homo sapiens
gcaggattggttgcatcttctcagga

SEQ ID NO: 112820 - DNA, 26 bp, Homo sapiens
caggattggttgcatcttctcaggaa

SEQ ID NO: 112821 - DNA, 26 bp, Homo sapiens
aggattggttgcatcttctcaggaag

SEQ ID NO: 112822 - DNA, 26 bp, Homo sapiens
ggattggttgcatcttctcaggaagg

SEQ ID NO: 112823 - DNA, 26 bp, Homo sapiens
gattggttgcatcttctcaggaaggc

SEQ ID NO: 112824 - DNA, 26 bp, Homo sapiens
attggttgcatcttctcaggaaggct

SEQ ID NO: 112825 - DNA, 26 bp, Homo sapiens
ttggttgcatcttctcaggaaggctg

SEQ ID NO: 112826 - DNA, 26 bp, Homo sapiens
tggttgcatcttctcaggaaggctgc

SEQ ID NO: 112827 - DNA, 26 bp, Homo sapiens
ggttgcatcttctcaggaaggctgcc

SEQ ID NO: 112828 - DNA, 26 bp, Homo sapiens
gttgcatcttctcaggaaggctgccc

SEQ ID NO: 112829 - DNA, 26 bp, Homo sapiens
ttgcatcttctcaggaaggctgccct

SEQ ID NO: 112830 - DNA, 26 bp, Homo sapiens
tgcatcttctcaggaaggctgccctg

SEQ ID NO: 112831 - DNA, 26 bp, Homo sapiens
gcatcttctcaggaaggctgccctgg

SEQ ID NO: 112832 - DNA, 26 bp, Homo sapiens
catcttctcaggaaggctgccctggt

SEQ ID NO: 112833 - DNA, 26 bp, Homo sapiens
atcttctcaggaaggctgccctggtt

SEQ ID NO: 112834 - DNA, 26 bp, Homo sapiens
tcttctcaggaaggctgccctggttg

SEQ ID NO: 112835 - DNA, 26 bp, Homo sapiens
cttctcaggaaggctgccctggttgg

SEQ ID NO: 112836 - DNA, 26 bp, Homo sapiens
ttctcaggaaggctgccctggttgga

SEQ ID NO: 112837 - DNA, 26 bp, Homo sapiens
tctcaggaaggctgccctggttggag

SEQ ID NO: 112838 - DNA, 26 bp, Homo sapiens
ctcaggaaggctgccctggttggagc

SEQ ID NO: 112839 - DNA, 26 bp, Homo sapiens
tcagcctcccaaagtgctgggattac

SEQ ID NO: 112840 - DNA, 26 bp, Homo sapiens
cagcctcccaaagtgctgggattaca

SEQ ID NO: 112841 - DNA, 26 bp, Homo sapiens
agcctcccaaagtgctgggattacag

SEQ ID NO: 112842 - DNA, 26 bp, Homo sapiens
gcctcccaaagtgctgggattacagg

SEQ ID NO: 112843 - DNA, 26 bp, Homo sapiens
cctcccaaagtgctgggattacaggc

SEQ ID NO: 112844 - DNA, 26 bp, Homo sapiens
ctcccaaagtgctgggattacaggca

SEQ ID NO: 112845 - DNA, 26 bp, Homo sapiens
tcccaaagtgctgggattacaggcat

SEQ ID NO: 112846 - DNA, 26 bp, Homo sapiens
cccaaagtgctgggattacaggcatg

SEQ ID NO: 112847 - DNA, 26 bp, Homo sapiens
ccaaagtgctgggattacaggcatga

SEQ ID NO: 112848 - DNA, 26 bp, Homo sapiens
caaagtgctgggattacaggcatgag

SEQ ID NO: 112849 - DNA, 26 bp, Homo sapiens
aaagtgctgggattacaggcatgagc

SEQ ID NO: 112850 - DNA, 26 bp, Homo sapiens
aagtgctgggattacaggcatgagct

SEQ ID NO: 112851 - DNA, 26 bp, Homo sapiens
agtgctgggattacaggcatgagcta

SEQ ID NO: 112852 - DNA, 26 bp, Homo sapiens
gtgctgggattacaggcatgagctac

SEQ ID NO: 112853 - DNA, 26 bp, Homo sapiens
tgctgggattacaggcatgagctacc

SEQ ID NO: 112854 - DNA, 26 bp, Homo sapiens
gctgggattacaggcatgagctacca

SEQ ID NO: 112855 - DNA, 26 bp, Homo sapiens
ctgggattacaggcatgagctaccac

SEQ ID NO: 112856 - DNA, 26 bp, Homo sapiens
tgggattacaggcatgagctaccacg

SEQ ID NO: 112857 - DNA, 26 bp, Homo sapiens
gggattacaggcatgagctaccacgc

SEQ ID NO: 112858 - DNA, 26 bp, Homo sapiens
ggattacaggcatgagctaccacgcc

SEQ ID NO: 112859 - DNA, 26 bp, Homo sapiens
gattacaggcatgagctaccacgccc

SEQ ID NO: 112860 - DNA, 26 bp, Homo sapiens
attacaggcatgagctaccacgcccg

SEQ ID NO: 112861 - DNA, 26 bp, Homo sapiens
ttacaggcatgagctaccacgcccgg

SEQ ID NO: 112862 - DNA, 26 bp, Homo sapiens
tacaggcatgagctaccacgcccggc

SEQ ID NO: 112863 - DNA, 26 bp, Homo sapiens
acaggcatgagctaccacgcccggcc

SEQ ID NO: 112864 - DNA, 26 bp, Homo sapiens
caggcatgagctaccacgcccggcca

SEQ ID NO: 112865 - DNA, 26 bp, Homo sapiens
aggcatgagctaccacgcccggccag

SEQ ID NO: 112866 - DNA, 26 bp, Homo sapiens
ggcatgagctaccacgcccggccaga

SEQ ID NO: 112867 - DNA, 26 bp, Homo sapiens
gcatgagctaccacgcccggccagaa

SEQ ID NO: 112868 - DNA, 26 bp, Homo sapiens
catgagctaccacgcccggccagaaa

SEQ ID NO: 112869 - DNA, 26 bp, Homo sapiens
atgagctaccacgcccggccagaaaa

SEQ ID NO: 112870 - DNA, 26 bp, Homo sapiens
tgagctaccacgcccggccagaaaaa

SEQ ID NO: 112871 - DNA, 26 bp, Homo sapiens
gagctaccacgcccggccagaaaaag

SEQ ID NO: 112872 - DNA, 26 bp, Homo sapiens
agctaccacgcccggccagaaaaagg

SEQ ID NO: 112873 - DNA, 26 bp, Homo sapiens
gctaccacgcccggccagaaaaaggt

SEQ ID NO: 112874 - DNA, 26 bp, Homo sapiens
ctaccacgcccggccagaaaaaggta

SEQ ID NO: 112875 - DNA, 26 bp, Homo sapiens
taccacgcccggccagaaaaaggtac

SEQ ID NO: 112876 - DNA, 26 bp, Homo sapiens
accacgcccggccagaaaaaggtaca

SEQ ID NO: 112877 - DNA, 26 bp, Homo sapiens
ccacgcccggccagaaaaaggtacat

SEQ ID NO: 112878 - DNA, 26 bp, Homo sapiens
cacgcccggccagaaaaaggtacatt

SEQ ID NO: 112879 - DNA, 26 bp, Homo sapiens
acgcccggccagaaaaaggtacattc

SEQ ID NO: 112880 - DNA, 26 bp, Homo sapiens
cgcccggccagaaaaaggtacattct

SEQ ID NO: 112881 - DNA, 26 bp, Homo sapiens
gcccggccagaaaaaggtacattctt

SEQ ID NO: 112882 - DNA, 26 bp, Homo sapiens
cccggccagaaaaaggtacattctta

SEQ ID NO: 112883 - DNA, 26 bp, Homo sapiens
ccggccagaaaaaggtacattcttag

SEQ ID NO: 112884 - DNA, 26 bp, Homo sapiens
cggccagaaaaaggtacattcttaga

SEQ ID NO: 112885 - DNA, 26 bp, Homo sapiens
ggccagaaaaaggtacattcttagac

SEQ ID NO: 112886 - DNA, 26 bp, Homo sapiens
gccagaaaaaggtacattcttagact

SEQ ID NO: 112887 - DNA, 26 bp, Homo sapiens
ccagaaaaaggtacattcttagactt

SEQ ID NO: 112888 - DNA, 26 bp, Homo sapiens
cagaaaaaggtacattcttagacttc

SEQ ID NO: 112889 - DNA, 26 bp, Homo sapiens
agaaaaaggtacattcttagacttct

SEQ ID NO: 112890 - DNA, 26 bp, Homo sapiens
gaaaaaggtacattcttagacttctg

SEQ ID NO: 112891 - DNA, 26 bp, Homo sapiens
aaaaaggtacattcttagacttctgc

SEQ ID NO: 112892 - DNA, 26 bp, Homo sapiens
aaaaggtacattcttagacttctgca

SEQ ID NO: 112893 - DNA, 26 bp, Homo sapiens
aaaggtacattcttagacttctgcaa

SEQ ID NO: 112894 - DNA, 26 bp, Homo sapiens
aaggtacattcttagacttctgcaaa

SEQ ID NO: 112895 - DNA, 26 bp, Homo sapiens
aggtacattcttagacttctgcaaat

SEQ ID NO: 112896 - DNA, 26 bp, Homo sapiens
ggtacattcttagacttctgcaaatg

SEQ ID NO: 112897 - DNA, 26 bp, Homo sapiens
gtacattcttagacttctgcaaatga

SEQ ID NO: 112898 - DNA, 26 bp, Homo sapiens
tacattcttagacttctgcaaatgag

SEQ ID NO: 112899 - DNA, 26 bp, Homo sapiens
acattcttagacttctgcaaatgaga

SEQ ID NO: 112900 - DNA, 26 bp, Homo sapiens
cattcttagacttctgcaaatgagac

SEQ ID NO: 112901 - DNA, 26 bp, Homo sapiens
attcttagacttctgcaaatgagacc

SEQ ID NO: 112902 - DNA, 26 bp, Homo sapiens
ttcttagacttctgcaaatgagacca

SEQ ID NO: 112903 - DNA, 26 bp, Homo sapiens
tcttagacttctgcaaatgagaccag

SEQ ID NO: 112904 - DNA, 26 bp, Homo sapiens
cttagacttctgcaaatgagaccagt

SEQ ID NO: 112905 - DNA, 26 bp, Homo sapiens
ttagacttctgcaaatgagaccagtc

SEQ ID NO: 112906 - DNA, 26 bp, Homo sapiens
tagacttctgcaaatgagaccagtca

SEQ ID NO: 112907 - DNA, 26 bp, Homo sapiens
agacttctgcaaatgagaccagtcat

SEQ ID NO: 112908 - DNA, 26 bp, Homo sapiens
gacttctgcaaatgagaccagtcatg

SEQ ID NO: 112909 - DNA, 26 bp, Homo sapiens
acttctgcaaatgagaccagtcatga

SEQ ID NO: 112910 - DNA, 26 bp, Homo sapiens
cttctgcaaatgagaccagtcatgac

SEQ ID NO: 112911 - DNA, 26 bp, Homo sapiens
ttctgcaaatgagaccagtcatgacc

SEQ ID NO: 112912 - DNA, 26 bp, Homo sapiens
tctgcaaatgagaccagtcatgacca

SEQ ID NO: 112913 - DNA, 26 bp, Homo sapiens
ctgcaaatgagaccagtcatgaccac

SEQ ID NO: 112914 - DNA, 26 bp, Homo sapiens
tgcaaatgagaccagtcatgaccacc

SEQ ID NO: 112915 - DNA, 26 bp, Homo sapiens
gcaaatgagaccagtcatgaccacct

SEQ ID NO: 112916 - DNA, 26 bp, Homo sapiens
caaatgagaccagtcatgaccacctt

SEQ ID NO: 112917 - DNA, 26 bp, Homo sapiens
aaatgagaccagtcatgaccaccttg

SEQ ID NO: 112918 - DNA, 26 bp, Homo sapiens
aatgagaccagtcatgaccaccttgg

SEQ ID NO: 112919 - DNA, 26 bp, Homo sapiens
atgagaccagtcatgaccaccttggg

SEQ ID NO: 112920 - DNA, 26 bp, Homo sapiens
tgagaccagtcatgaccaccttgggg

SEQ ID NO: 112921 - DNA, 26 bp, Homo sapiens
gagaccagtcatgaccaccttggggg

SEQ ID NO: 112922 - DNA, 26 bp, Homo sapiens
agaccagtcatgaccaccttgggggc

SEQ ID NO: 112923 - DNA, 26 bp, Homo sapiens
gaccagtcatgaccaccttgggggcc

SEQ ID NO: 112924 - DNA, 26 bp, Homo sapiens
accagtcatgaccaccttgggggccc

SEQ ID NO: 112925 - DNA, 26 bp, Homo sapiens
ccagtcatgaccaccttgggggccct

SEQ ID NO: 112926 - DNA, 26 bp, Homo sapiens
cagtcatgaccaccttgggggccctt

SEQ ID NO: 112927 - DNA, 26 bp, Homo sapiens
agtcatgaccaccttgggggcccttt

SEQ ID NO: 112928 - DNA, 26 bp, Homo sapiens
gtcatgaccaccttgggggccctttt

SEQ ID NO: 112929 - DNA, 26 bp, Homo sapiens
tcatgaccaccttgggggccctttta

SEQ ID NO: 112930 - DNA, 26 bp, Homo sapiens
catgaccaccttgggggcccttttac

SEQ ID NO: 112931 - DNA, 26 bp, Homo sapiens
atgaccaccttgggggcccttttacc

SEQ ID NO: 112932 - DNA, 26 bp, Homo sapiens
tgaccaccttgggggcccttttacct

SEQ ID NO: 112933 - DNA, 26 bp, Homo sapiens
gaccaccttgggggcccttttacctt

SEQ ID NO: 112934 - DNA, 26 bp, Homo sapiens
accaccttgggggcccttttaccttg

SEQ ID NO: 112935 - DNA, 26 bp, Homo sapiens
ccaccttgggggcccttttaccttgg

SEQ ID NO: 112936 - DNA, 26 bp, Homo sapiens
caccttgggggcccttttaccttggt

SEQ ID NO: 112937 - DNA, 26 bp, Homo sapiens
accttgggggcccttttaccttggtg

SEQ ID NO: 112938 - DNA, 26 bp, Homo sapiens
ccttgggggcccttttaccttggtgt

SEQ ID NO: 112939 - DNA, 26 bp, Homo sapiens
cttgggggcccttttaccttggtgtt

SEQ ID NO: 112940 - DNA, 26 bp, Homo sapiens
ttgggggcccttttaccttggtgttt

SEQ ID NO: 112941 - DNA, 26 bp, Homo sapiens
tgggggcccttttaccttggtgttta

SEQ ID NO: 112942 - DNA, 26 bp, Homo sapiens
gggggcccttttaccttggtgtttac

SEQ ID NO: 112943 - DNA, 26 bp, Homo sapiens
ggggcccttttaccttggtgtttacc

SEQ ID NO: 112944 - DNA, 26 bp, Homo sapiens
gggcccttttaccttggtgtttacca

SEQ ID NO: 112945 - DNA, 26 bp, Homo sapiens
ggcccttttaccttggtgtttaccag

SEQ ID NO: 112946 - DNA, 26 bp, Homo sapiens
gcccttttaccttggtgtttaccagt

SEQ ID NO: 112947 - DNA, 26 bp, Homo sapiens
cccttttaccttggtgtttaccagtg

SEQ ID NO: 112948 - DNA, 26 bp, Homo sapiens
ccttttaccttggtgtttaccagtgt

SEQ ID NO: 112949 - DNA, 26 bp, Homo sapiens
cttttaccttggtgtttaccagtgtc

SEQ ID NO: 112950 - DNA, 26 bp, Homo sapiens
ttttaccttggtgtttaccagtgtct

SEQ ID NO: 112951 - DNA, 26 bp, Homo sapiens
tttaccttggtgtttaccagtgtctt

SEQ ID NO: 112952 - DNA, 26 bp, Homo sapiens
ttaccttggtgtttaccagtgtcttt

SEQ ID NO: 112953 - DNA, 26 bp, Homo sapiens
taccttggtgtttaccagtgtctttt

SEQ ID NO: 112954 - DNA, 26 bp, Homo sapiens
accttggtgtttaccagtgtctttta

SEQ ID NO: 112955 - DNA, 26 bp, Homo sapiens
ccttggtgtttaccagtgtcttttat

SEQ ID NO: 112956 - DNA, 26 bp, Homo sapiens
cttggtgtttaccagtgtcttttatg

SEQ ID NO: 112957 - DNA, 26 bp, Homo sapiens
ttggtgtttaccagtgtcttttatgt

SEQ ID NO: 112958 - DNA, 26 bp, Homo sapiens
tggtgtttaccagtgtcttttatgtc

SEQ ID NO: 112959 - DNA, 26 bp, Homo sapiens
ggtgtttaccagtgtcttttatgtct

SEQ ID NO: 112960 - DNA, 26 bp, Homo sapiens
gtgtttaccagtgtcttttatgtctt

SEQ ID NO: 112961 - DNA, 26 bp, Homo sapiens
tgtttaccagtgtcttttatgtcttc

SEQ ID NO: 112962 - DNA, 26 bp, Homo sapiens
gtttaccagtgtcttttatgtcttca

SEQ ID NO: 112963 - DNA, 26 bp, Homo sapiens
tttaccagtgtcttttatgtcttcat

SEQ ID NO: 112964 - DNA, 26 bp, Homo sapiens
ttaccagtgtcttttatgtcttcatc

SEQ ID NO: 112965 - DNA, 26 bp, Homo sapiens
taccagtgtcttttatgtcttcatct

SEQ ID NO: 112966 - DNA, 26 bp, Homo sapiens
accagtgtcttttatgtcttcatcta

SEQ ID NO: 112967 - DNA, 26 bp, Homo sapiens
ccagtgtcttttatgtcttcatctat

SEQ ID NO: 112968 - DNA, 26 bp, Homo sapiens
cagtgtcttttatgtcttcatctata

SEQ ID NO: 112969 - DNA, 26 bp, Homo sapiens
agtgtcttttatgtcttcatctatag

SEQ ID NO: 112970 - DNA, 26 bp, Homo sapiens
gtgtcttttatgtcttcatctataga

SEQ ID NO: 112971 - DNA, 26 bp, Homo sapiens
tgtcttttatgtcttcatctatagaa

SEQ ID NO: 112972 - DNA, 26 bp, Homo sapiens
gtcttttatgtcttcatctatagaac

SEQ ID NO: 112973 - DNA, 26 bp, Homo sapiens
tcttttatgtcttcatctatagaact

SEQ ID NO: 112974 - DNA, 26 bp, Homo sapiens
cttttatgtcttcatctatagaacta

SEQ ID NO: 112975 - DNA, 26 bp, Homo sapiens
ttttatgtcttcatctatagaactag

SEQ ID NO: 112976 - DNA, 26 bp, Homo sapiens
tttatgtcttcatctatagaactagg

SEQ ID NO: 112977 - DNA, 26 bp, Homo sapiens
ttatgtcttcatctatagaactaggt

SEQ ID NO: 112978 - DNA, 26 bp, Homo sapiens
tatgtcttcatctatagaactaggtt

SEQ ID NO: 112979 - DNA, 26 bp, Homo sapiens
atgtcttcatctatagaactaggttg

SEQ ID NO: 112980 - DNA, 26 bp, Homo sapiens
tgtcttcatctatagaactaggttga

SEQ ID NO: 112981 - DNA, 26 bp, Homo sapiens
gtcttcatctatagaactaggttgat

SEQ ID NO: 112982 - DNA, 26 bp, Homo sapiens
tcttcatctatagaactaggttgatt

SEQ ID NO: 112983 - DNA, 26 bp, Homo sapiens
cttcatctatagaactaggttgattt

SEQ ID NO: 112984 - DNA, 26 bp, Homo sapiens
ttcatctatagaactaggttgatttg

SEQ ID NO: 112985 - DNA, 26 bp, Homo sapiens
tcatctatagaactaggttgatttgt

SEQ ID NO: 112986 - DNA, 26 bp, Homo sapiens
catctatagaactaggttgatttgtt

SEQ ID NO: 112987 - DNA, 26 bp, Homo sapiens
atctatagaactaggttgatttgttt

SEQ ID NO: 112988 - DNA, 26 bp, Homo sapiens
tctatagaactaggttgatttgtttt

SEQ ID NO: 112989 - DNA, 26 bp, Homo sapiens
ctatagaactaggttgatttgttttg

SEQ ID NO: 112990 - DNA, 26 bp, Homo sapiens
tatagaactaggttgatttgttttga

SEQ ID NO: 112991 - DNA, 26 bp, Homo sapiens
atagaactaggttgatttgttttgaa

SEQ ID NO: 112992 - DNA, 26 bp, Homo sapiens
tagaactaggttgatttgttttgaag

SEQ ID NO: 112993 - DNA, 26 bp, Homo sapiens
agaactaggttgatttgttttgaagg

SEQ ID NO: 112994 - DNA, 26 bp, Homo sapiens
gaactaggttgatttgttttgaaggc

SEQ ID NO: 112995 - DNA, 26 bp, Homo sapiens
aactaggttgatttgttttgaaggct

SEQ ID NO: 112996 - DNA, 26 bp, Homo sapiens
actaggttgatttgttttgaaggctc

SEQ ID NO: 112997 - DNA, 26 bp, Homo sapiens
ctaggttgatttgttttgaaggctct

SEQ ID NO: 112998 - DNA, 26 bp, Homo sapiens
taggttgatttgttttgaaggctctc

SEQ ID NO: 112999 - DNA, 26 bp, Homo sapiens
aggttgatttgttttgaaggctctca

SEQ ID NO: 113000 - DNA, 26 bp, Homo sapiens
ggttgatttgttttgaaggctctcaa

SEQ ID NO: 113001 - DNA, 26 bp, Homo sapiens
gttgatttgttttgaaggctctcaat

SEQ ID NO: 113002 - DNA, 26 bp, Homo sapiens
ttgatttgttttgaaggctctcaata

SEQ ID NO: 113003 - DNA, 26 bp, Homo sapiens
tgatttgttttgaaggctctcaataa

SEQ ID NO: 113004 - DNA, 26 bp, Homo sapiens
gatttgttttgaaggctctcaataat

SEQ ID NO: 113005 - DNA, 26 bp, Homo sapiens
atttgttttgaaggctctcaataatc

SEQ ID NO: 113006 - DNA, 26 bp, Homo sapiens
tttgttttgaaggctctcaataatct

SEQ ID NO: 113007 - DNA, 26 bp, Homo sapiens
ttgttttgaaggctctcaataatcta

SEQ ID NO: 113008 - DNA, 26 bp, Homo sapiens
tgttttgaaggctctcaataatctag

SEQ ID NO: 113009 - DNA, 26 bp, Homo sapiens
gttttgaaggctctcaataatctagg

SEQ ID NO: 113010 - DNA, 26 bp, Homo sapiens
ttttgaaggctctcaataatctagga

SEQ ID NO: 113011 - DNA, 26 bp, Homo sapiens
tttgaaggctctcaataatctaggag

SEQ ID NO: 113012 - DNA, 26 bp, Homo sapiens
ttgaaggctctcaataatctaggagc

SEQ ID NO: 113013 - DNA, 26 bp, Homo sapiens
tgaaggctctcaataatctaggagcc

SEQ ID NO: 113014 - DNA, 26 bp, Homo sapiens
gaaggctctcaataatctaggagcca

SEQ ID NO: 113015 - DNA, 26 bp, Homo sapiens
aaggctctcaataatctaggagccat

SEQ ID NO: 113016 - DNA, 26 bp, Homo sapiens
aggctctcaataatctaggagccatc

SEQ ID NO: 113017 - DNA, 26 bp, Homo sapiens
ggctctcaataatctaggagccatct

SEQ ID NO: 113018 - DNA, 26 bp, Homo sapiens
gctctcaataatctaggagccatcta

SEQ ID NO: 113019 - DNA, 26 bp, Homo sapiens
ctctcaataatctaggagccatctag

SEQ ID NO: 113020 - DNA, 26 bp, Homo sapiens
tctcaataatctaggagccatctaga

SEQ ID NO: 113021 - DNA, 26 bp, Homo sapiens
ctcaataatctaggagccatctagag

SEQ ID NO: 113022 - DNA, 26 bp, Homo sapiens
tcaataatctaggagccatctagagc

SEQ ID NO: 113023 - DNA, 26 bp, Homo sapiens
caataatctaggagccatctagagct

SEQ ID NO: 113024 - DNA, 26 bp, Homo sapiens
aataatctaggagccatctagagctg

SEQ ID NO: 113025 - DNA, 26 bp, Homo sapiens
ataatctaggagccatctagagctgt

SEQ ID NO: 113026 - DNA, 26 bp, Homo sapiens
taatctaggagccatctagagctgtg

SEQ ID NO: 113027 - DNA, 26 bp, Homo sapiens
aatctaggagccatctagagctgtgc

SEQ ID NO: 113028 - DNA, 26 bp, Homo sapiens
atctaggagccatctagagctgtgca

SEQ ID NO: 113029 - DNA, 26 bp, Homo sapiens
tctaggagccatctagagctgtgcac

SEQ ID NO: 113030 - DNA, 26 bp, Homo sapiens
ctaggagccatctagagctgtgcact

SEQ ID NO: 113031 - DNA, 26 bp, Homo sapiens
taggagccatctagagctgtgcactc

SEQ ID NO: 113032 - DNA, 26 bp, Homo sapiens
aggagccatctagagctgtgcactcc

SEQ ID NO: 113033 - DNA, 26 bp, Homo sapiens
ggagccatctagagctgtgcactcca

SEQ ID NO: 113034 - DNA, 26 bp, Homo sapiens
gagccatctagagctgtgcactccaa

SEQ ID NO: 113035 - DNA, 26 bp, Homo sapiens
agccatctagagctgtgcactccaat

SEQ ID NO: 113036 - DNA, 26 bp, Homo sapiens
gccatctagagctgtgcactccaata

SEQ ID NO: 113037 - DNA, 26 bp, Homo sapiens
ccatctagagctgtgcactccaatac

SEQ ID NO: 113038 - DNA, 26 bp, Homo sapiens
catctagagctgtgcactccaataca

SEQ ID NO: 113039 - DNA, 26 bp, Homo sapiens
atctagagctgtgcactccaatacag

SEQ ID NO: 113040 - DNA, 26 bp, Homo sapiens
tctagagctgtgcactccaatacagt

SEQ ID NO: 113041 - DNA, 26 bp, Homo sapiens
ctagagctgtgcactccaatacagta

SEQ ID NO: 113042 - DNA, 26 bp, Homo sapiens
tagagctgtgcactccaatacagtag

SEQ ID NO: 113043 - DNA, 26 bp, Homo sapiens
agagctgtgcactccaatacagtagc

SEQ ID NO: 113044 - DNA, 26 bp, Homo sapiens
gagctgtgcactccaatacagtagcc

SEQ ID NO: 113045 - DNA, 26 bp, Homo sapiens
agctgtgcactccaatacagtagcca

SEQ ID NO: 113046 - DNA, 26 bp, Homo sapiens
gctgtgcactccaatacagtagccac

SEQ ID NO: 113047 - DNA, 26 bp, Homo sapiens
ctgtgcactccaatacagtagccact

SEQ ID NO: 113048 - DNA, 26 bp, Homo sapiens
tgtgcactccaatacagtagccacta

SEQ ID NO: 113049 - DNA, 26 bp, Homo sapiens
gtgcactccaatacagtagccactag

SEQ ID NO: 113050 - DNA, 26 bp, Homo sapiens
tgcactccaatacagtagccactagc

SEQ ID NO: 113051 - DNA, 26 bp, Homo sapiens
gcactccaatacagtagccactagcc

SEQ ID NO: 113052 - DNA, 26 bp, Homo sapiens
cactccaatacagtagccactagcca

SEQ ID NO: 113053 - DNA, 26 bp, Homo sapiens
actccaatacagtagccactagccat

SEQ ID NO: 113054 - DNA, 26 bp, Homo sapiens
ctccaatacagtagccactagccatg

SEQ ID NO: 113055 - DNA, 26 bp, Homo sapiens
tccaatacagtagccactagccatgt

SEQ ID NO: 113056 - DNA, 26 bp, Homo sapiens
ccaatacagtagccactagccatgtg

SEQ ID NO: 113057 - DNA, 26 bp, Homo sapiens
caatacagtagccactagccatgtgt

SEQ ID NO: 113058 - DNA, 26 bp, Homo sapiens
aatacagtagccactagccatgtgtg

SEQ ID NO: 113059 - DNA, 26 bp, Homo sapiens
atacagtagccactagccatgtgtgg

SEQ ID NO: 113060 - DNA, 26 bp, Homo sapiens
tacagtagccactagccatgtgtggc

SEQ ID NO: 113061 - DNA, 26 bp, Homo sapiens
acagtagccactagccatgtgtggcg

SEQ ID NO: 113062 - DNA, 26 bp, Homo sapiens
cagtagccactagccatgtgtggcga

SEQ ID NO: 113063 - DNA, 26 bp, Homo sapiens
agtagccactagccatgtgtggcgat

SEQ ID NO: 113064 - DNA, 26 bp, Homo sapiens
gtagccactagccatgtgtggcgatt

SEQ ID NO: 113065 - DNA, 26 bp, Homo sapiens
tagccactagccatgtgtggcgattt

SEQ ID NO: 113066 - DNA, 26 bp, Homo sapiens
agccactagccatgtgtggcgattta

SEQ ID NO: 113067 - DNA, 26 bp, Homo sapiens
gccactagccatgtgtggcgatttaa

SEQ ID NO: 113068 - DNA, 26 bp, Homo sapiens
ccactagccatgtgtggcgatttaaa

SEQ ID NO: 113069 - DNA, 26 bp, Homo sapiens
cactagccatgtgtggcgatttaaat

SEQ ID NO: 113070 - DNA, 26 bp, Homo sapiens
actagccatgtgtggcgatttaaatt

SEQ ID NO: 113071 - DNA, 26 bp, Homo sapiens
ctagccatgtgtggcgatttaaattt

SEQ ID NO: 113072 - DNA, 26 bp, Homo sapiens
tagccatgtgtggcgatttaaattta

SEQ ID NO: 113073 - DNA, 26 bp, Homo sapiens
agccatgtgtggcgatttaaatttac

SEQ ID NO: 113074 - DNA, 26 bp, Homo sapiens
gccatgtgtggcgatttaaatttaca

SEQ ID NO: 113075 - DNA, 26 bp, Homo sapiens
ccatgtgtggcgatttaaatttacaa

SEQ ID NO: 113076 - DNA, 26 bp, Homo sapiens
catgtgtggcgatttaaatttacaat

SEQ ID NO: 113077 - DNA, 26 bp, Homo sapiens
atgtgtggcgatttaaatttacaatc

SEQ ID NO: 113078 - DNA, 26 bp, Homo sapiens
tgtgtggcgatttaaatttacaatca

SEQ ID NO: 113079 - DNA, 26 bp, Homo sapiens
gtgtggcgatttaaatttacaatcaa

SEQ ID NO: 113080 - DNA, 26 bp, Homo sapiens
tgtggcgatttaaatttacaatcaaa

SEQ ID NO: 113081 - DNA, 26 bp, Homo sapiens
gtggcgatttaaatttacaatcaaaa

SEQ ID NO: 113082 - DNA, 26 bp, Homo sapiens
tggcgatttaaatttacaatcaaaat

SEQ ID NO: 113083 - DNA, 26 bp, Homo sapiens
ggcgatttaaatttacaatcaaaatt

SEQ ID NO: 113084 - DNA, 26 bp, Homo sapiens
gcgatttaaatttacaatcaaaattt

SEQ ID NO: 113085 - DNA, 26 bp, Homo sapiens
cgatttaaatttacaatcaaaattta

SEQ ID NO: 113086 - DNA, 26 bp, Homo sapiens
gatttaaatttacaatcaaaatttaa

SEQ ID NO: 113087 - DNA, 26 bp, Homo sapiens
atttaaatttacaatcaaaatttaat

SEQ ID NO: 113088 - DNA, 26 bp, Homo sapiens
tttaaatttacaatcaaaatttaatt

SEQ ID NO: 113089 - DNA, 26 bp, Homo sapiens
ttaaatttacaatcaaaatttaattc

SEQ ID NO: 113090 - DNA, 26 bp, Homo sapiens
taaatttacaatcaaaatttaattcc

SEQ ID NO: 113091 - DNA, 26 bp, Homo sapiens
aaatttacaatcaaaatttaattcct

SEQ ID NO: 113092 - DNA, 26 bp, Homo sapiens
aatttacaatcaaaatttaattcctc

SEQ ID NO: 113093 - DNA, 26 bp, Homo sapiens
atttacaatcaaaatttaattcctca

SEQ ID NO: 113094 - DNA, 26 bp, Homo sapiens
tttacaatcaaaatttaattcctcag

SEQ ID NO: 113095 - DNA, 26 bp, Homo sapiens
ttacaatcaaaatttaattcctcagt

SEQ ID NO: 113096 - DNA, 26 bp, Homo sapiens
tacaatcaaaatttaattcctcagtc

SEQ ID NO: 113097 - DNA, 26 bp, Homo sapiens
acaatcaaaatttaattcctcagtca

SEQ ID NO: 113098 - DNA, 26 bp, Homo sapiens
caatcaaaatttaattcctcagtcaa

SEQ ID NO: 113099 - DNA, 26 bp, Homo sapiens
aatcaaaatttaattcctcagtcaag

SEQ ID NO: 113100 - DNA, 26 bp, Homo sapiens
atcaaaatttaattcctcagtcaagc

SEQ ID NO: 113101 - DNA, 26 bp, Homo sapiens
tcaaaatttaattcctcagtcaagct

SEQ ID NO: 113102 - DNA, 26 bp, Homo sapiens
caaaatttaattcctcagtcaagcta

SEQ ID NO: 113103 - DNA, 26 bp, Homo sapiens
aaaatttaattcctcagtcaagctaa

SEQ ID NO: 113104 - DNA, 26 bp, Homo sapiens
aaatttaattcctcagtcaagctaaa

SEQ ID NO: 113105 - DNA, 26 bp, Homo sapiens
aatttaattcctcagtcaagctaaac

SEQ ID NO: 113106 - DNA, 26 bp, Homo sapiens
atttaattcctcagtcaagctaaaca

SEQ ID NO: 113107 - DNA, 26 bp, Homo sapiens
tttaattcctcagtcaagctaaacac

SEQ ID NO: 113108 - DNA, 26 bp, Homo sapiens
ttaattcctcagtcaagctaaacaca

SEQ ID NO: 113109 - DNA, 26 bp, Homo sapiens
taattcctcagtcaagctaaacacat

SEQ ID NO: 113110 - DNA, 26 bp, Homo sapiens
aattcctcagtcaagctaaacacatt

SEQ ID NO: 113111 - DNA, 26 bp, Homo sapiens
attcctcagtcaagctaaacacattc

SEQ ID NO: 113112 - DNA, 26 bp, Homo sapiens
ttcctcagtcaagctaaacacattcc

SEQ ID NO: 113113 - DNA, 26 bp, Homo sapiens
tcctcagtcaagctaaacacattcca

SEQ ID NO: 113114 - DNA, 26 bp, Homo sapiens
cctcagtcaagctaaacacattccaa

SEQ ID NO: 113115 - DNA, 26 bp, Homo sapiens
ctcagtcaagctaaacacattccaag

SEQ ID NO: 113116 - DNA, 26 bp, Homo sapiens
tcagtcaagctaaacacattccaagt

SEQ ID NO: 113117 - DNA, 26 bp, Homo sapiens
cagtcaagctaaacacattccaagtg

SEQ ID NO: 113118 - DNA, 26 bp, Homo sapiens
agtcaagctaaacacattccaagtga

SEQ ID NO: 113119 - DNA, 26 bp, Homo sapiens
gtcaagctaaacacattccaagtgat

SEQ ID NO: 113120 - DNA, 26 bp, Homo sapiens
tcaagctaaacacattccaagtgatt

SEQ ID NO: 113121 - DNA, 26 bp, Homo sapiens
caagctaaacacattccaagtgatta

SEQ ID NO: 113122 - DNA, 26 bp, Homo sapiens
aagctaaacacattccaagtgattaa

SEQ ID NO: 113123 - DNA, 26 bp, Homo sapiens
agctaaacacattccaagtgattaac

SEQ ID NO: 113124 - DNA, 26 bp, Homo sapiens
gctaaacacattccaagtgattaaca

SEQ ID NO: 113125 - DNA, 26 bp, Homo sapiens
ctaaacacattccaagtgattaacag

SEQ ID NO: 113126 - DNA, 26 bp, Homo sapiens
taaacacattccaagtgattaacagc

SEQ ID NO: 113127 - DNA, 26 bp, Homo sapiens
aaacacattccaagtgattaacagcc

SEQ ID NO: 113128 - DNA, 26 bp, Homo sapiens
aacacattccaagtgattaacagcca

SEQ ID NO: 113129 - DNA, 26 bp, Homo sapiens
acacattccaagtgattaacagccaa

SEQ ID NO: 113130 - DNA, 26 bp, Homo sapiens
cacattccaagtgattaacagccaat

SEQ ID NO: 113131 - DNA, 26 bp, Homo sapiens
acattccaagtgattaacagccaatg

SEQ ID NO: 113132 - DNA, 26 bp, Homo sapiens
cattccaagtgattaacagccaatgt

SEQ ID NO: 113133 - DNA, 26 bp, Homo sapiens
attccaagtgattaacagccaatgtg

SEQ ID NO: 113134 - DNA, 26 bp, Homo sapiens
ttccaagtgattaacagccaatgtgc

SEQ ID NO: 113135 - DNA, 26 bp, Homo sapiens
tccaagtgattaacagccaatgtgcc

SEQ ID NO: 113136 - DNA, 26 bp, Homo sapiens
ccaagtgattaacagccaatgtgcct

SEQ ID NO: 113137 - DNA, 26 bp, Homo sapiens
caagtgattaacagccaatgtgccta

SEQ ID NO: 113138 - DNA, 26 bp, Homo sapiens
aagtgattaacagccaatgtgcctag

SEQ ID NO: 113139 - DNA, 26 bp, Homo sapiens
agtgattaacagccaatgtgcctagt

SEQ ID NO: 113140 - DNA, 26 bp, Homo sapiens
gtgattaacagccaatgtgcctagtg

SEQ ID NO: 113141 - DNA, 26 bp, Homo sapiens
tgattaacagccaatgtgcctagtgt

SEQ ID NO: 113142 - DNA, 26 bp, Homo sapiens
gattaacagccaatgtgcctagtgtc

SEQ ID NO: 113143 - DNA, 26 bp, Homo sapiens
attaacagccaatgtgcctagtgtct

SEQ ID NO: 113144 - DNA, 26 bp, Homo sapiens
ttaacagccaatgtgcctagtgtcta

SEQ ID NO: 113145 - DNA, 26 bp, Homo sapiens
taacagccaatgtgcctagtgtctaa

SEQ ID NO: 113146 - DNA, 26 bp, Homo sapiens
aacagccaatgtgcctagtgtctaat

SEQ ID NO: 113147 - DNA, 26 bp, Homo sapiens
acagccaatgtgcctagtgtctaatg

SEQ ID NO: 113148 - DNA, 26 bp, Homo sapiens
cagccaatgtgcctagtgtctaatgt

SEQ ID NO: 113149 - DNA, 26 bp, Homo sapiens
agccaatgtgcctagtgtctaatgta

SEQ ID NO: 113150 - DNA, 26 bp, Homo sapiens
gccaatgtgcctagtgtctaatgtac

SEQ ID NO: 113151 - DNA, 26 bp, Homo sapiens
ccaatgtgcctagtgtctaatgtact

SEQ ID NO: 113152 - DNA, 26 bp, Homo sapiens
caatgtgcctagtgtctaatgtactg

SEQ ID NO: 113153 - DNA, 26 bp, Homo sapiens
aatgtgcctagtgtctaatgtactgg

SEQ ID NO: 113154 - DNA, 26 bp, Homo sapiens
atgtgcctagtgtctaatgtactgga

SEQ ID NO: 113155 - DNA, 26 bp, Homo sapiens
tgtgcctagtgtctaatgtactggac

SEQ ID NO: 113156 - DNA, 26 bp, Homo sapiens
gtgcctagtgtctaatgtactggaca

SEQ ID NO: 113157 - DNA, 26 bp, Homo sapiens
tgcctagtgtctaatgtactggacag

SEQ ID NO: 113158 - DNA, 26 bp, Homo sapiens
gcctagtgtctaatgtactggacagt

SEQ ID NO: 113159 - DNA, 26 bp, Homo sapiens
cctagtgtctaatgtactggacagtg

SEQ ID NO: 113160 - DNA, 26 bp, Homo sapiens
ctagtgtctaatgtactggacagtga

SEQ ID NO: 113161 - DNA, 26 bp, Homo sapiens
tagtgtctaatgtactggacagtgag

SEQ ID NO: 113162 - DNA, 26 bp, Homo sapiens
agtgtctaatgtactggacagtgagt

SEQ ID NO: 113163 - DNA, 26 bp, Homo sapiens
gtgtctaatgtactggacagtgagtg

SEQ ID NO: 113164 - DNA, 26 bp, Homo sapiens
tgtctaatgtactggacagtgagtgc

SEQ ID NO: 113165 - DNA, 26 bp, Homo sapiens
gtctaatgtactggacagtgagtgca

SEQ ID NO: 113166 - DNA, 26 bp, Homo sapiens
tctaatgtactggacagtgagtgcag

SEQ ID NO: 113167 - DNA, 26 bp, Homo sapiens
ctaatgtactggacagtgagtgcaga

SEQ ID NO: 113168 - DNA, 26 bp, Homo sapiens
taatgtactggacagtgagtgcagag

SEQ ID NO: 113169 - DNA, 26 bp, Homo sapiens
aatgtactggacagtgagtgcagagg

SEQ ID NO: 113170 - DNA, 26 bp, Homo sapiens
atgtactggacagtgagtgcagaggt

SEQ ID NO: 113171 - DNA, 26 bp, Homo sapiens
tgtactggacagtgagtgcagaggta

SEQ ID NO: 113172 - DNA, 26 bp, Homo sapiens
gtactggacagtgagtgcagaggtag

SEQ ID NO: 113173 - DNA, 26 bp, Homo sapiens
tactggacagtgagtgcagaggtaga

SEQ ID NO: 113174 - DNA, 26 bp, Homo sapiens
actggacagtgagtgcagaggtagaa

SEQ ID NO: 113175 - DNA, 26 bp, Homo sapiens
ctggacagtgagtgcagaggtagaac

SEQ ID NO: 113176 - DNA, 26 bp, Homo sapiens
tggacagtgagtgcagaggtagaaca

SEQ ID NO: 113177 - DNA, 26 bp, Homo sapiens
ggacagtgagtgcagaggtagaacat

SEQ ID NO: 113178 - DNA, 26 bp, Homo sapiens
gacagtgagtgcagaggtagaacatt

SEQ ID NO: 113179 - DNA, 26 bp, Homo sapiens
acagtgagtgcagaggtagaacattt

SEQ ID NO: 113180 - DNA, 26 bp, Homo sapiens
cagtgagtgcagaggtagaacatttc

SEQ ID NO: 113181 - DNA, 26 bp, Homo sapiens
agtgagtgcagaggtagaacatttcc

SEQ ID NO: 113182 - DNA, 26 bp, Homo sapiens
gtgagtgcagaggtagaacatttcca

SEQ ID NO: 113183 - DNA, 26 bp, Homo sapiens
tgagtgcagaggtagaacatttccat

SEQ ID NO: 113184 - DNA, 26 bp, Homo sapiens
gagtgcagaggtagaacatttccatc

SEQ ID NO: 113185 - DNA, 26 bp, Homo sapiens
agtgcagaggtagaacatttccatca

SEQ ID NO: 113186 - DNA, 26 bp, Homo sapiens
gtgcagaggtagaacatttccatcat

SEQ ID NO: 113187 - DNA, 26 bp, Homo sapiens
tgcagaggtagaacatttccatcatc

SEQ ID NO: 113188 - DNA, 26 bp, Homo sapiens
gcagaggtagaacatttccatcatct

SEQ ID NO: 113189 - DNA, 26 bp, Homo sapiens
cagaggtagaacatttccatcatctc

SEQ ID NO: 113190 - DNA, 26 bp, Homo sapiens
agaggtagaacatttccatcatctca

SEQ ID NO: 113191 - DNA, 26 bp, Homo sapiens
gaggtagaacatttccatcatctcag

SEQ ID NO: 113192 - DNA, 26 bp, Homo sapiens
aggtagaacatttccatcatctcagg

SEQ ID NO: 113193 - DNA, 26 bp, Homo sapiens
ggtagaacatttccatcatctcagga

SEQ ID NO: 113194 - DNA, 26 bp, Homo sapiens
gtagaacatttccatcatctcaggaa

SEQ ID NO: 113195 - DNA, 26 bp, Homo sapiens
tagaacatttccatcatctcaggaag

SEQ ID NO: 113196 - DNA, 26 bp, Homo sapiens
agaacatttccatcatctcaggaagt

SEQ ID NO: 113197 - DNA, 26 bp, Homo sapiens
gaacatttccatcatctcaggaagtt

SEQ ID NO: 113198 - DNA, 26 bp, Homo sapiens
aacatttccatcatctcaggaagttc

SEQ ID NO: 113199 - DNA, 26 bp, Homo sapiens
acatttccatcatctcaggaagttct

SEQ ID NO: 113200 - DNA, 26 bp, Homo sapiens
catttccatcatctcaggaagttctg

SEQ ID NO: 113201 - DNA, 26 bp, Homo sapiens
atttccatcatctcaggaagttctgt

SEQ ID NO: 113202 - DNA, 26 bp, Homo sapiens
tttccatcatctcaggaagttctgtt

SEQ ID NO: 113203 - DNA, 26 bp, Homo sapiens
ttccatcatctcaggaagttctgttg

SEQ ID NO: 113204 - DNA, 26 bp, Homo sapiens
tccatcatctcaggaagttctgttga

SEQ ID NO: 113205 - DNA, 26 bp, Homo sapiens
ccatcatctcaggaagttctgttgaa

SEQ ID NO: 113206 - DNA, 26 bp, Homo sapiens
catcatctcaggaagttctgttgaac

SEQ ID NO: 113207 - DNA, 26 bp, Homo sapiens
atcatctcaggaagttctgttgaaca

SEQ ID NO: 113208 - DNA, 26 bp, Homo sapiens
tcatctcaggaagttctgttgaacag

SEQ ID NO: 113209 - DNA, 26 bp, Homo sapiens
catctcaggaagttctgttgaacagt

SEQ ID NO: 113210 - DNA, 26 bp, Homo sapiens
atctcaggaagttctgttgaacagta

SEQ ID NO: 113211 - DNA, 26 bp, Homo sapiens
tctcaggaagttctgttgaacagtac

SEQ ID NO: 113212 - DNA, 26 bp, Homo sapiens
ctcaggaagttctgttgaacagtact

SEQ ID NO: 113213 - DNA, 26 bp, Homo sapiens
tcaggaagttctgttgaacagtactg

SEQ ID NO: 113214 - DNA, 26 bp, Homo sapiens
caggaagttctgttgaacagtactga

SEQ ID NO: 113215 - DNA, 26 bp, Homo sapiens
aggaagttctgttgaacagtactgat

SEQ ID NO: 113216 - DNA, 26 bp, Homo sapiens
ggaagttctgttgaacagtactgatc

SEQ ID NO: 113217 - DNA, 26 bp, Homo sapiens
gaagttctgttgaacagtactgatct

SEQ ID NO: 113218 - DNA, 26 bp, Homo sapiens
aagttctgttgaacagtactgatctg

SEQ ID NO: 113219 - DNA, 26 bp, Homo sapiens
agttctgttgaacagtactgatctgc

SEQ ID NO: 113220 - DNA, 26 bp, Homo sapiens
gttctgttgaacagtactgatctgct

SEQ ID NO: 113221 - DNA, 26 bp, Homo sapiens
ttctgttgaacagtactgatctgctg

SEQ ID NO: 113222 - DNA, 26 bp, Homo sapiens
tctgttgaacagtactgatctgctgt

SEQ ID NO: 113223 - DNA, 26 bp, Homo sapiens
ctgttgaacagtactgatctgctgtg

SEQ ID NO: 113224 - DNA, 26 bp, Homo sapiens
tgttgaacagtactgatctgctgtgt

SEQ ID NO: 113225 - DNA, 26 bp, Homo sapiens
gttgaacagtactgatctgctgtgta

SEQ ID NO: 113226 - DNA, 26 bp, Homo sapiens
ttgaacagtactgatctgctgtgtac

SEQ ID NO: 113227 - DNA, 26 bp, Homo sapiens
tgaacagtactgatctgctgtgtaca

SEQ ID NO: 113228 - DNA, 26 bp, Homo sapiens
gaacagtactgatctgctgtgtacag

SEQ ID NO: 113229 - DNA, 26 bp, Homo sapiens
aacagtactgatctgctgtgtacagc

SEQ ID NO: 113230 - DNA, 26 bp, Homo sapiens
acagtactgatctgctgtgtacagcc

SEQ ID NO: 113231 - DNA, 26 bp, Homo sapiens
cagtactgatctgctgtgtacagcct

SEQ ID NO: 113232 - DNA, 26 bp, Homo sapiens
agtactgatctgctgtgtacagcctg

SEQ ID NO: 113233 - DNA, 26 bp, Homo sapiens
gtactgatctgctgtgtacagcctgc

SEQ ID NO: 113234 - DNA, 26 bp, Homo sapiens
tactgatctgctgtgtacagcctgct

SEQ ID NO: 113235 - DNA, 26 bp, Homo sapiens
actgatctgctgtgtacagcctgctg

SEQ ID NO: 113236 - DNA, 26 bp, Homo sapiens
ctgatctgctgtgtacagcctgctgt

SEQ ID NO: 113237 - DNA, 26 bp, Homo sapiens
tgatctgctgtgtacagcctgctgtg

SEQ ID NO: 113238 - DNA, 26 bp, Homo sapiens
gatctgctgtgtacagcctgctgtgt

SEQ ID NO: 113239 - DNA, 26 bp, Homo sapiens
atctgctgtgtacagcctgctgtgta

SEQ ID NO: 113240 - DNA, 26 bp, Homo sapiens
tctgctgtgtacagcctgctgtgtag

SEQ ID NO: 113241 - DNA, 26 bp, Homo sapiens
ctgctgtgtacagcctgctgtgtagc

SEQ ID NO: 113242 - DNA, 26 bp, Homo sapiens
tgctgtgtacagcctgctgtgtagca

SEQ ID NO: 113243 - DNA, 26 bp, Homo sapiens
gctgtgtacagcctgctgtgtagcag

SEQ ID NO: 113244 - DNA, 26 bp, Homo sapiens
ctgtgtacagcctgctgtgtagcagg

SEQ ID NO: 113245 - DNA, 26 bp, Homo sapiens
tgtgtacagcctgctgtgtagcaggt

SEQ ID NO: 113246 - DNA, 26 bp, Homo sapiens
gtgtacagcctgctgtgtagcaggtg

SEQ ID NO: 113247 - DNA, 26 bp, Homo sapiens
tgtacagcctgctgtgtagcaggtgc

SEQ ID NO: 113248 - DNA, 26 bp, Homo sapiens
gtacagcctgctgtgtagcaggtgct

SEQ ID NO: 113249 - DNA, 26 bp, Homo sapiens
tacagcctgctgtgtagcaggtgctt

SEQ ID NO: 113250 - DNA, 26 bp, Homo sapiens
acagcctgctgtgtagcaggtgcttt

SEQ ID NO: 113251 - DNA, 26 bp, Homo sapiens
cagcctgctgtgtagcaggtgcttta

SEQ ID NO: 113252 - DNA, 26 bp, Homo sapiens
agcctgctgtgtagcaggtgctttag

SEQ ID NO: 113253 - DNA, 26 bp, Homo sapiens
gcctgctgtgtagcaggtgctttaga

SEQ ID NO: 113254 - DNA, 26 bp, Homo sapiens
cctgctgtgtagcaggtgctttagaa

SEQ ID NO: 113255 - DNA, 26 bp, Homo sapiens
ctgctgtgtagcaggtgctttagaaa

SEQ ID NO: 113256 - DNA, 26 bp, Homo sapiens
tgctgtgtagcaggtgctttagaaat

SEQ ID NO: 113257 - DNA, 26 bp, Homo sapiens
gctgtgtagcaggtgctttagaaata

SEQ ID NO: 113258 - DNA, 26 bp, Homo sapiens
ctgtgtagcaggtgctttagaaatag

SEQ ID NO: 113259 - DNA, 26 bp, Homo sapiens
tgtgtagcaggtgctttagaaatagt

SEQ ID NO: 113260 - DNA, 26 bp, Homo sapiens
gtgtagcaggtgctttagaaatagtc

SEQ ID NO: 113261 - DNA, 26 bp, Homo sapiens
tgtagcaggtgctttagaaatagtca

SEQ ID NO: 113262 - DNA, 26 bp, Homo sapiens
gtagcaggtgctttagaaatagtcat

SEQ ID NO: 113263 - DNA, 26 bp, Homo sapiens
tagcaggtgctttagaaatagtcatt

SEQ ID NO: 113264 - DNA, 26 bp, Homo sapiens
agcaggtgctttagaaatagtcattg

SEQ ID NO: 113265 - DNA, 26 bp, Homo sapiens
gcaggtgctttagaaatagtcattgc

SEQ ID NO: 113266 - DNA, 26 bp, Homo sapiens
caggtgctttagaaatagtcattgca

SEQ ID NO: 113267 - DNA, 26 bp, Homo sapiens
aggtgctttagaaatagtcattgcat

SEQ ID NO: 113268 - DNA, 26 bp, Homo sapiens
ggtgctttagaaatagtcattgcatg

SEQ ID NO: 113269 - DNA, 26 bp, Homo sapiens
gtgctttagaaatagtcattgcatga

SEQ ID NO: 113270 - DNA, 26 bp, Homo sapiens
tgctttagaaatagtcattgcatgaa

SEQ ID NO: 113271 - DNA, 26 bp, Homo sapiens
gctttagaaatagtcattgcatgaat

SEQ ID NO: 113272 - DNA, 26 bp, Homo sapiens
ctttagaaatagtcattgcatgaatg

SEQ ID NO: 113273 - DNA, 26 bp, Homo sapiens
tttagaaatagtcattgcatgaatgg

SEQ ID NO: 113274 - DNA, 26 bp, Homo sapiens
ttagaaatagtcattgcatgaatggt

SEQ ID NO: 113275 - DNA, 26 bp, Homo sapiens
tagaaatagtcattgcatgaatggtc

SEQ ID NO: 113276 - DNA, 26 bp, Homo sapiens
agaaatagtcattgcatgaatggtcc

SEQ ID NO: 113277 - DNA, 26 bp, Homo sapiens
gaaatagtcattgcatgaatggtcct

SEQ ID NO: 113278 - DNA, 26 bp, Homo sapiens
aaatagtcattgcatgaatggtcctc

SEQ ID NO: 113279 - DNA, 26 bp, Homo sapiens
aatagtcattgcatgaatggtcctct

SEQ ID NO: 113280 - DNA, 26 bp, Homo sapiens
atagtcattgcatgaatggtcctcta

SEQ ID NO: 113281 - DNA, 26 bp, Homo sapiens
tagtcattgcatgaatggtcctctag

SEQ ID NO: 113282 - DNA, 26 bp, Homo sapiens
agtcattgcatgaatggtcctctaga

SEQ ID NO: 113283 - DNA, 26 bp, Homo sapiens
gtcattgcatgaatggtcctctagac

SEQ ID NO: 113284 - DNA, 26 bp, Homo sapiens
tcattgcatgaatggtcctctagact

SEQ ID NO: 113285 - DNA, 26 bp, Homo sapiens
cattgcatgaatggtcctctagactg

SEQ ID NO: 113286 - DNA, 26 bp, Homo sapiens
attgcatgaatggtcctctagactgt

SEQ ID NO: 113287 - DNA, 26 bp, Homo sapiens
ttgcatgaatggtcctctagactgta

SEQ ID NO: 113288 - DNA, 26 bp, Homo sapiens
tgcatgaatggtcctctagactgtat

SEQ ID NO: 113289 - DNA, 26 bp, Homo sapiens
gcatgaatggtcctctagactgtatg

SEQ ID NO: 113290 - DNA, 26 bp, Homo sapiens
catgaatggtcctctagactgtatgc

SEQ ID NO: 113291 - DNA, 26 bp, Homo sapiens
atgaatggtcctctagactgtatgcc

SEQ ID NO: 113292 - DNA, 26 bp, Homo sapiens
tgaatggtcctctagactgtatgcca

SEQ ID NO: 113293 - DNA, 26 bp, Homo sapiens
gaatggtcctctagactgtatgccat

SEQ ID NO: 113294 - DNA, 26 bp, Homo sapiens
aatggtcctctagactgtatgccatt

SEQ ID NO: 113295 - DNA, 26 bp, Homo sapiens
atggtcctctagactgtatgccatta

SEQ ID NO: 113296 - DNA, 26 bp, Homo sapiens
tggtcctctagactgtatgccattac

SEQ ID NO: 113297 - DNA, 26 bp, Homo sapiens
ggtcctctagactgtatgccattact

SEQ ID NO: 113298 - DNA, 26 bp, Homo sapiens
gtcctctagactgtatgccattacta

SEQ ID NO: 113299 - DNA, 26 bp, Homo sapiens
tcctctagactgtatgccattactac

SEQ ID NO: 113300 - DNA, 26 bp, Homo sapiens
cctctagactgtatgccattactact

SEQ ID NO: 113301 - DNA, 26 bp, Homo sapiens
ctctagactgtatgccattactacta

SEQ ID NO: 113302 - DNA, 26 bp, Homo sapiens
tctagactgtatgccattactactaa

SEQ ID NO: 113303 - DNA, 26 bp, Homo sapiens
ctagactgtatgccattactactaag

SEQ ID NO: 113304 - DNA, 26 bp, Homo sapiens
tagactgtatgccattactactaaga

SEQ ID NO: 113305 - DNA, 26 bp, Homo sapiens
agactgtatgccattactactaagag

SEQ ID NO: 113306 - DNA, 26 bp, Homo sapiens
gactgtatgccattactactaagagc

SEQ ID NO: 113307 - DNA, 26 bp, Homo sapiens
actgtatgccattactactaagagct

SEQ ID NO: 113308 - DNA, 26 bp, Homo sapiens
ctgtatgccattactactaagagctg

SEQ ID NO: 113309 - DNA, 26 bp, Homo sapiens
tgtatgccattactactaagagctgt

SEQ ID NO: 113310 - DNA, 26 bp, Homo sapiens
gtatgccattactactaagagctgtg

SEQ ID NO: 113311 - DNA, 26 bp, Homo sapiens
tatgccattactactaagagctgtgg

SEQ ID NO: 113312 - DNA, 26 bp, Homo sapiens
atgccattactactaagagctgtggt

SEQ ID NO: 113313 - DNA, 26 bp, Homo sapiens
tgccattactactaagagctgtggtt

SEQ ID NO: 113314 - DNA, 26 bp, Homo sapiens
gccattactactaagagctgtggttt

SEQ ID NO: 113315 - DNA, 26 bp, Homo sapiens
ccattactactaagagctgtggtttc

SEQ ID NO: 113316 - DNA, 26 bp, Homo sapiens
cattactactaagagctgtggtttct

SEQ ID NO: 113317 - DNA, 26 bp, Homo sapiens
attactactaagagctgtggtttcta

SEQ ID NO: 113318 - DNA, 26 bp, Homo sapiens
ttactactaagagctgtggtttctac

SEQ ID NO: 113319 - DNA, 26 bp, Homo sapiens
tactactaagagctgtggtttctact

SEQ ID NO: 113320 - DNA, 26 bp, Homo sapiens
actactaagagctgtggtttctactc

SEQ ID NO: 113321 - DNA, 26 bp, Homo sapiens
ctactaagagctgtggtttctactct

SEQ ID NO: 113322 - DNA, 26 bp, Homo sapiens
tactaagagctgtggtttctactctc

SEQ ID NO: 113323 - DNA, 26 bp, Homo sapiens
actaagagctgtggtttctactctcc

SEQ ID NO: 113324 - DNA, 26 bp, Homo sapiens
ctaagagctgtggtttctactctcct

SEQ ID NO: 113325 - DNA, 26 bp, Homo sapiens
taagagctgtggtttctactctcctc

SEQ ID NO: 113326 - DNA, 26 bp, Homo sapiens
aagagctgtggtttctactctcctcc

SEQ ID NO: 113327 - DNA, 26 bp, Homo sapiens
agagctgtggtttctactctcctcct

SEQ ID NO: 113328 - DNA, 26 bp, Homo sapiens
gagctgtggtttctactctcctcctc

SEQ ID NO: 113329 - DNA, 26 bp, Homo sapiens
agctgtggtttctactctcctcctca

SEQ ID NO: 113330 - DNA, 26 bp, Homo sapiens
gctgtggtttctactctcctcctcat

SEQ ID NO: 113331 - DNA, 26 bp, Homo sapiens
ctgtggtttctactctcctcctcatt

SEQ ID NO: 113332 - DNA, 26 bp, Homo sapiens
tgtggtttctactctcctcctcattt

SEQ ID NO: 113333 - DNA, 26 bp, Homo sapiens
gtggtttctactctcctcctcatttc

SEQ ID NO: 113334 - DNA, 26 bp, Homo sapiens
tggtttctactctcctcctcatttcc

SEQ ID NO: 113335 - DNA, 26 bp, Homo sapiens
ggtttctactctcctcctcatttccc

SEQ ID NO: 113336 - DNA, 26 bp, Homo sapiens
gtttctactctcctcctcatttccct

SEQ ID NO: 113337 - DNA, 26 bp, Homo sapiens
tttctactctcctcctcatttccctt

SEQ ID NO: 113338 - DNA, 26 bp, Homo sapiens
ttctactctcctcctcatttcccttt

SEQ ID NO: 113339 - DNA, 26 bp, Homo sapiens
tctactctcctcctcatttccctttc

SEQ ID NO: 113340 - DNA, 26 bp, Homo sapiens
ctactctcctcctcatttccctttct

SEQ ID NO: 113341 - DNA, 26 bp, Homo sapiens
tactctcctcctcatttccctttctg

SEQ ID NO: 113342 - DNA, 26 bp, Homo sapiens
actctcctcctcatttccctttctgg

SEQ ID NO: 113343 - DNA, 26 bp, Homo sapiens
ctctcctcctcatttccctttctggc

SEQ ID NO: 113344 - DNA, 26 bp, Homo sapiens
tctcctcctcatttccctttctggcc

SEQ ID NO: 113345 - DNA, 26 bp, Homo sapiens
ctcctcctcatttccctttctggcca

SEQ ID NO: 113346 - DNA, 26 bp, Homo sapiens
tcctcctcatttccctttctggccag

SEQ ID NO: 113347 - DNA, 26 bp, Homo sapiens
cctcctcatttccctttctggccagc

SEQ ID NO: 113348 - DNA, 26 bp, Homo sapiens
ctcctcatttccctttctggccagca

SEQ ID NO: 113349 - DNA, 26 bp, Homo sapiens
tcctcatttccctttctggccagcat

SEQ ID NO: 113350 - DNA, 26 bp, Homo sapiens
cctcatttccctttctggccagcata

SEQ ID NO: 113351 - DNA, 26 bp, Homo sapiens
ctcatttccctttctggccagcatac

SEQ ID NO: 113352 - DNA, 26 bp, Homo sapiens
tcatttccctttctggccagcatacc

SEQ ID NO: 113353 - DNA, 26 bp, Homo sapiens
catttccctttctggccagcatacca

SEQ ID NO: 113354 - DNA, 26 bp, Homo sapiens
atttccctttctggccagcataccaa

SEQ ID NO: 113355 - DNA, 26 bp, Homo sapiens
tttccctttctggccagcataccaag

SEQ ID NO: 113356 - DNA, 26 bp, Homo sapiens
ttccctttctggccagcataccaaga

SEQ ID NO: 113357 - DNA, 26 bp, Homo sapiens
tccctttctggccagcataccaagaa

SEQ ID NO: 113358 - DNA, 26 bp, Homo sapiens
ccctttctggccagcataccaagaaa

SEQ ID NO: 113359 - DNA, 26 bp, Homo sapiens
cctttctggccagcataccaagaaag

SEQ ID NO: 113360 - DNA, 26 bp, Homo sapiens
ctttctggccagcataccaagaaagt

SEQ ID NO: 113361 - DNA, 26 bp, Homo sapiens
tttctggccagcataccaagaaagtt

SEQ ID NO: 113362 - DNA, 26 bp, Homo sapiens
ttctggccagcataccaagaaagtta

SEQ ID NO: 113363 - DNA, 26 bp, Homo sapiens
tctggccagcataccaagaaagttac

SEQ ID NO: 113364 - DNA, 26 bp, Homo sapiens
ctggccagcataccaagaaagttact

SEQ ID NO: 113365 - DNA, 26 bp, Homo sapiens
tggccagcataccaagaaagttacta

SEQ ID NO: 113366 - DNA, 26 bp, Homo sapiens
ggccagcataccaagaaagttactag

SEQ ID NO: 113367 - DNA, 26 bp, Homo sapiens
gccagcataccaagaaagttactagg

SEQ ID NO: 113368 - DNA, 26 bp, Homo sapiens
ccagcataccaagaaagttactagga

SEQ ID NO: 113369 - DNA, 26 bp, Homo sapiens
cagcataccaagaaagttactaggaa

SEQ ID NO: 113370 - DNA, 26 bp, Homo sapiens
agcataccaagaaagttactaggaat

SEQ ID NO: 113371 - DNA, 26 bp, Homo sapiens
gcataccaagaaagttactaggaatt

SEQ ID NO: 113372 - DNA, 26 bp, Homo sapiens
cataccaagaaagttactaggaattc

SEQ ID NO: 113373 - DNA, 26 bp, Homo sapiens
ataccaagaaagttactaggaattca

SEQ ID NO: 113374 - DNA, 26 bp, Homo sapiens
taccaagaaagttactaggaattcaa

SEQ ID NO: 113375 - DNA, 26 bp, Homo sapiens
accaagaaagttactaggaattcaag

SEQ ID NO: 113376 - DNA, 26 bp, Homo sapiens
ccaagaaagttactaggaattcaagt

SEQ ID NO: 113377 - DNA, 26 bp, Homo sapiens
caagaaagttactaggaattcaagtt

SEQ ID NO: 113378 - DNA, 26 bp, Homo sapiens
aagaaagttactaggaattcaagttg

SEQ ID NO: 113379 - DNA, 26 bp, Homo sapiens
agaaagttactaggaattcaagttgg

SEQ ID NO: 113380 - DNA, 26 bp, Homo sapiens
gaaagttactaggaattcaagttgga

SEQ ID NO: 113381 - DNA, 26 bp, Homo sapiens
aaagttactaggaattcaagttggag

SEQ ID NO: 113382 - DNA, 26 bp, Homo sapiens
aagttactaggaattcaagttggagt

SEQ ID NO: 113383 - DNA, 26 bp, Homo sapiens
agttactaggaattcaagttggagtc

SEQ ID NO: 113384 - DNA, 26 bp, Homo sapiens
gttactaggaattcaagttggagtct

SEQ ID NO: 113385 - DNA, 26 bp, Homo sapiens
ttactaggaattcaagttggagtctc

SEQ ID NO: 113386 - DNA, 26 bp, Homo sapiens
tactaggaattcaagttggagtctct

SEQ ID NO: 113387 - DNA, 26 bp, Homo sapiens
actaggaattcaagttggagtctcta

SEQ ID NO: 113388 - DNA, 26 bp, Homo sapiens
ctaggaattcaagttggagtctctag

SEQ ID NO: 113389 - DNA, 26 bp, Homo sapiens
taggaattcaagttggagtctctagg

SEQ ID NO: 113390 - DNA, 26 bp, Homo sapiens
aggaattcaagttggagtctctaggt

SEQ ID NO: 113391 - DNA, 26 bp, Homo sapiens
ggaattcaagttggagtctctaggtc

SEQ ID NO: 113392 - DNA, 26 bp, Homo sapiens
gaattcaagttggagtctctaggtcc

SEQ ID NO: 113393 - DNA, 26 bp, Homo sapiens
aattcaagttggagtctctaggtcca

SEQ ID NO: 113394 - DNA, 26 bp, Homo sapiens
attcaagttggagtctctaggtccac

SEQ ID NO: 113395 - DNA, 26 bp, Homo sapiens
ttcaagttggagtctctaggtccaca

SEQ ID NO: 113396 - DNA, 26 bp, Homo sapiens
tcaagttggagtctctaggtccacac

SEQ ID NO: 113397 - DNA, 26 bp, Homo sapiens
caagttggagtctctaggtccacaca

SEQ ID NO: 113398 - DNA, 26 bp, Homo sapiens
aagttggagtctctaggtccacacag

SEQ ID NO: 113399 - DNA, 26 bp, Homo sapiens
agttggagtctctaggtccacacagt

SEQ ID NO: 113400 - DNA, 26 bp, Homo sapiens
gttggagtctctaggtccacacagtg

SEQ ID NO: 113401 - DNA, 26 bp, Homo sapiens
ttggagtctctaggtccacacagtga

SEQ ID NO: 113402 - DNA, 26 bp, Homo sapiens
tggagtctctaggtccacacagtgaa

SEQ ID NO: 113403 - DNA, 26 bp, Homo sapiens
ggagtctctaggtccacacagtgaag

SEQ ID NO: 113404 - DNA, 26 bp, Homo sapiens
gagtctctaggtccacacagtgaagg

SEQ ID NO: 113405 - DNA, 26 bp, Homo sapiens
agtctctaggtccacacagtgaagga

SEQ ID NO: 113406 - DNA, 26 bp, Homo sapiens
gtctctaggtccacacagtgaaggat

SEQ ID NO: 113407 - DNA, 26 bp, Homo sapiens
tctctaggtccacacagtgaaggatg

SEQ ID NO: 113408 - DNA, 26 bp, Homo sapiens
ctctaggtccacacagtgaaggatgt

SEQ ID NO: 113409 - DNA, 26 bp, Homo sapiens
tctaggtccacacagtgaaggatgta

SEQ ID NO: 113410 - DNA, 26 bp, Homo sapiens
ctaggtccacacagtgaaggatgtaa

SEQ ID NO: 113411 - DNA, 26 bp, Homo sapiens
taggtccacacagtgaaggatgtaat

SEQ ID NO: 113412 - DNA, 26 bp, Homo sapiens
aggtccacacagtgaaggatgtaatt

SEQ ID NO: 113413 - DNA, 26 bp, Homo sapiens
ggtccacacagtgaaggatgtaattt

SEQ ID NO: 113414 - DNA, 26 bp, Homo sapiens
gtccacacagtgaaggatgtaatttt

SEQ ID NO: 113415 - DNA, 26 bp, Homo sapiens
tccacacagtgaaggatgtaatttta

SEQ ID NO: 113416 - DNA, 26 bp, Homo sapiens
ccacacagtgaaggatgtaattttaa

SEQ ID NO: 113417 - DNA, 26 bp, Homo sapiens
cacacagtgaaggatgtaattttaag

SEQ ID NO: 113418 - DNA, 26 bp, Homo sapiens
acacagtgaaggatgtaattttaagg

SEQ ID NO: 113419 - DNA, 26 bp, Homo sapiens
cacagtgaaggatgtaattttaaggc

SEQ ID NO: 113420 - DNA, 26 bp, Homo sapiens
acagtgaaggatgtaattttaaggcc

SEQ ID NO: 113421 - DNA, 26 bp, Homo sapiens
cagtgaaggatgtaattttaaggccc

SEQ ID NO: 113422 - DNA, 26 bp, Homo sapiens
agtgaaggatgtaattttaaggccct

SEQ ID NO: 113423 - DNA, 26 bp, Homo sapiens
gtgaaggatgtaattttaaggccctg

SEQ ID NO: 113424 - DNA, 26 bp, Homo sapiens
tgaaggatgtaattttaaggccctgg

SEQ ID NO: 113425 - DNA, 26 bp, Homo sapiens
gaaggatgtaattttaaggccctggg

SEQ ID NO: 113426 - DNA, 26 bp, Homo sapiens
aaggatgtaattttaaggccctggga

SEQ ID NO: 113427 - DNA, 26 bp, Homo sapiens
aggatgtaattttaaggccctgggaa

SEQ ID NO: 113428 - DNA, 26 bp, Homo sapiens
ggatgtaattttaaggccctgggaaa

SEQ ID NO: 113429 - DNA, 26 bp, Homo sapiens
gatgtaattttaaggccctgggaaag

SEQ ID NO: 113430 - DNA, 26 bp, Homo sapiens
atgtaattttaaggccctgggaaagg

SEQ ID NO: 113431 - DNA, 26 bp, Homo sapiens
tgtaattttaaggccctgggaaaggc

SEQ ID NO: 113432 - DNA, 26 bp, Homo sapiens
gtaattttaaggccctgggaaaggca

SEQ ID NO: 113433 - DNA, 26 bp, Homo sapiens
taattttaaggccctgggaaaggcaa

SEQ ID NO: 113434 - DNA, 26 bp, Homo sapiens
aattttaaggccctgggaaaggcaag

SEQ ID NO: 113435 - DNA, 26 bp, Homo sapiens
attttaaggccctgggaaaggcaaga

SEQ ID NO: 113436 - DNA, 26 bp, Homo sapiens
ttttaaggccctgggaaaggcaagat

SEQ ID NO: 113437 - DNA, 26 bp, Homo sapiens
tttaaggccctgggaaaggcaagatg

SEQ ID NO: 113438 - DNA, 26 bp, Homo sapiens
ttaaggccctgggaaaggcaagatga

SEQ ID NO: 113439 - DNA, 26 bp, Homo sapiens
taaggccctgggaaaggcaagatgag

SEQ ID NO: 113440 - DNA, 26 bp, Homo sapiens
aaggccctgggaaaggcaagatgagg

SEQ ID NO: 113441 - DNA, 26 bp, Homo sapiens
aggccctgggaaaggcaagatgaggc

SEQ ID NO: 113442 - DNA, 26 bp, Homo sapiens
ggccctgggaaaggcaagatgaggca

SEQ ID NO: 113443 - DNA, 26 bp, Homo sapiens
gccctgggaaaggcaagatgaggcat

SEQ ID NO: 113444 - DNA, 26 bp, Homo sapiens
ccctgggaaaggcaagatgaggcatc

SEQ ID NO: 113445 - DNA, 26 bp, Homo sapiens
cctgggaaaggcaagatgaggcatct

SEQ ID NO: 113446 - DNA, 26 bp, Homo sapiens
ctgggaaaggcaagatgaggcatctg

SEQ ID NO: 113447 - DNA, 26 bp, Homo sapiens
tgggaaaggcaagatgaggcatctga

SEQ ID NO: 113448 - DNA, 26 bp, Homo sapiens
gggaaaggcaagatgaggcatctgag

SEQ ID NO: 113449 - DNA, 26 bp, Homo sapiens
ggaaaggcaagatgaggcatctgagt

SEQ ID NO: 113450 - DNA, 26 bp, Homo sapiens
gaaaggcaagatgaggcatctgagtg

SEQ ID NO: 113451 - DNA, 26 bp, Homo sapiens
aaaggcaagatgaggcatctgagtga

SEQ ID NO: 113452 - DNA, 26 bp, Homo sapiens
aaggcaagatgaggcatctgagtgaa

SEQ ID NO: 113453 - DNA, 26 bp, Homo sapiens
aggcaagatgaggcatctgagtgaag

SEQ ID NO: 113454 - DNA, 26 bp, Homo sapiens
ggcaagatgaggcatctgagtgaaga

SEQ ID NO: 113455 - DNA, 26 bp, Homo sapiens
gcaagatgaggcatctgagtgaagac

SEQ ID NO: 113456 - DNA, 26 bp, Homo sapiens
caagatgaggcatctgagtgaagacc

SEQ ID NO: 113457 - DNA, 26 bp, Homo sapiens
aagatgaggcatctgagtgaagacca

SEQ ID NO: 113458 - DNA, 26 bp, Homo sapiens
agatgaggcatctgagtgaagaccaa

SEQ ID NO: 113459 - DNA, 26 bp, Homo sapiens
gatgaggcatctgagtgaagaccaac

SEQ ID NO: 113460 - DNA, 26 bp, Homo sapiens
atgaggcatctgagtgaagaccaact

SEQ ID NO: 113461 - DNA, 26 bp, Homo sapiens
tgaggcatctgagtgaagaccaactc

SEQ ID NO: 113462 - DNA, 26 bp, Homo sapiens
gaggcatctgagtgaagaccaactcc

SEQ ID NO: 113463 - DNA, 26 bp, Homo sapiens
aggcatctgagtgaagaccaactccc

SEQ ID NO: 113464 - DNA, 26 bp, Homo sapiens
ggcatctgagtgaagaccaactccca

SEQ ID NO: 113465 - DNA, 26 bp, Homo sapiens
gcatctgagtgaagaccaactcccag

SEQ ID NO: 113466 - DNA, 26 bp, Homo sapiens
catctgagtgaagaccaactcccagt

SEQ ID NO: 113467 - DNA, 26 bp, Homo sapiens
atctgagtgaagaccaactcccagtt

SEQ ID NO: 113468 - DNA, 26 bp, Homo sapiens
tctgagtgaagaccaactcccagttc

SEQ ID NO: 113469 - DNA, 26 bp, Homo sapiens
ctgagtgaagaccaactcccagttcc

SEQ ID NO: 113470 - DNA, 26 bp, Homo sapiens
tgagtgaagaccaactcccagttcct

SEQ ID NO: 113471 - DNA, 26 bp, Homo sapiens
gagtgaagaccaactcccagttccta

SEQ ID NO: 113472 - DNA, 26 bp, Homo sapiens
agtgaagaccaactcccagttcctaa

SEQ ID NO: 113473 - DNA, 26 bp, Homo sapiens
gtgaagaccaactcccagttcctaag

SEQ ID NO: 113474 - DNA, 26 bp, Homo sapiens
tgaagaccaactcccagttcctaaga

SEQ ID NO: 113475 - DNA, 26 bp, Homo sapiens
gaagaccaactcccagttcctaagac

SEQ ID NO: 113476 - DNA, 26 bp, Homo sapiens
aagaccaactcccagttcctaagact

SEQ ID NO: 113477 - DNA, 26 bp, Homo sapiens
agaccaactcccagttcctaagactc

SEQ ID NO: 113478 - DNA, 26 bp, Homo sapiens
gaccaactcccagttcctaagactcc

SEQ ID NO: 113479 - DNA, 26 bp, Homo sapiens
accaactcccagttcctaagactccc

SEQ ID NO: 113480 - DNA, 26 bp, Homo sapiens
ccaactcccagttcctaagactcccc

SEQ ID NO: 113481 - DNA, 26 bp, Homo sapiens
caactcccagttcctaagactccccc

SEQ ID NO: 113482 - DNA, 26 bp, Homo sapiens
aactcccagttcctaagactccccca

SEQ ID NO: 113483 - DNA, 26 bp, Homo sapiens
actcccagttcctaagactcccccag

SEQ ID NO: 113484 - DNA, 26 bp, Homo sapiens
ctcccagttcctaagactcccccaga

SEQ ID NO: 113485 - DNA, 26 bp, Homo sapiens
tcccagttcctaagactcccccagag

SEQ ID NO: 113486 - DNA, 26 bp, Homo sapiens
cccagttcctaagactcccccagagc

SEQ ID NO: 113487 - DNA, 26 bp, Homo sapiens
ccagttcctaagactcccccagagct

SEQ ID NO: 113488 - DNA, 26 bp, Homo sapiens
cagttcctaagactcccccagagctg

SEQ ID NO: 113489 - DNA, 26 bp, Homo sapiens
agttcctaagactcccccagagctgg

SEQ ID NO: 113490 - DNA, 26 bp, Homo sapiens
gttcctaagactcccccagagctggc

SEQ ID NO: 113491 - DNA, 26 bp, Homo sapiens
ttcctaagactcccccagagctggct

SEQ ID NO: 113492 - DNA, 26 bp, Homo sapiens
tcctaagactcccccagagctggctt

SEQ ID NO: 113493 - DNA, 26 bp, Homo sapiens
cctaagactcccccagagctggcttg

SEQ ID NO: 113494 - DNA, 26 bp, Homo sapiens
ctaagactcccccagagctggcttgc

SEQ ID NO: 113495 - DNA, 26 bp, Homo sapiens
taagactcccccagagctggcttgcc

SEQ ID NO: 113496 - DNA, 26 bp, Homo sapiens
aagactcccccagagctggcttgcct

SEQ ID NO: 113497 - DNA, 26 bp, Homo sapiens
agactcccccagagctggcttgcctg

SEQ ID NO: 113498 - DNA, 26 bp, Homo sapiens
gactcccccagagctggcttgcctgt

SEQ ID NO: 113499 - DNA, 26 bp, Homo sapiens
actcccccagagctggcttgcctgtc

SEQ ID NO: 113500 - DNA, 26 bp, Homo sapiens
ctcccccagagctggcttgcctgtcc

SEQ ID NO: 113501 - DNA, 26 bp, Homo sapiens
tcccccagagctggcttgcctgtcct

SEQ ID NO: 113502 - DNA, 26 bp, Homo sapiens
cccccagagctggcttgcctgtcctc

SEQ ID NO: 113503 - DNA, 26 bp, Homo sapiens
ccccagagctggcttgcctgtcctct

SEQ ID NO: 113504 - DNA, 26 bp, Homo sapiens
cccagagctggcttgcctgtcctcta

SEQ ID NO: 113505 - DNA, 26 bp, Homo sapiens
ccagagctggcttgcctgtcctctag

SEQ ID NO: 113506 - DNA, 26 bp, Homo sapiens
cagagctggcttgcctgtcctctagc

SEQ ID NO: 113507 - DNA, 26 bp, Homo sapiens
agagctggcttgcctgtcctctagct

SEQ ID NO: 113508 - DNA, 26 bp, Homo sapiens
gagctggcttgcctgtcctctagctg

SEQ ID NO: 113509 - DNA, 26 bp, Homo sapiens
agctggcttgcctgtcctctagctgc

SEQ ID NO: 113510 - DNA, 26 bp, Homo sapiens
gctggcttgcctgtcctctagctgca

SEQ ID NO: 113511 - DNA, 26 bp, Homo sapiens
ctggcttgcctgtcctctagctgcag

SEQ ID NO: 113512 - DNA, 26 bp, Homo sapiens
tggcttgcctgtcctctagctgcagc

SEQ ID NO: 113513 - DNA, 26 bp, Homo sapiens
ggcttgcctgtcctctagctgcagcc

SEQ ID NO: 113514 - DNA, 26 bp, Homo sapiens
gcttgcctgtcctctagctgcagcca

SEQ ID NO: 113515 - DNA, 26 bp, Homo sapiens
cttgcctgtcctctagctgcagccag

SEQ ID NO: 113516 - DNA, 26 bp, Homo sapiens
ttgcctgtcctctagctgcagccaga

SEQ ID NO: 113517 - DNA, 26 bp, Homo sapiens
tgcctgtcctctagctgcagccagac

SEQ ID NO: 113518 - DNA, 26 bp, Homo sapiens
gcctgtcctctagctgcagccagacc

SEQ ID NO: 113519 - DNA, 26 bp, Homo sapiens
cctgtcctctagctgcagccagaccg

SEQ ID NO: 113520 - DNA, 26 bp, Homo sapiens
ctgtcctctagctgcagccagaccga

SEQ ID NO: 113521 - DNA, 26 bp, Homo sapiens
tgtcctctagctgcagccagaccgat

SEQ ID NO: 113522 - DNA, 26 bp, Homo sapiens
gtcctctagctgcagccagaccgatg

SEQ ID NO: 113523 - DNA, 26 bp, Homo sapiens
tcctctagctgcagccagaccgatgg

SEQ ID NO: 113524 - DNA, 26 bp, Homo sapiens
cctctagctgcagccagaccgatggt

SEQ ID NO: 113525 - DNA, 26 bp, Homo sapiens
ctctagctgcagccagaccgatggtg

SEQ ID NO: 113526 - DNA, 26 bp, Homo sapiens
tctagctgcagccagaccgatggtgg

SEQ ID NO: 113527 - DNA, 26 bp, Homo sapiens
ctagctgcagccagaccgatggtggc

SEQ ID NO: 113528 - DNA, 26 bp, Homo sapiens
tagctgcagccagaccgatggtggca

SEQ ID NO: 113529 - DNA, 26 bp, Homo sapiens
agctgcagccagaccgatggtggcac

SEQ ID NO: 113530 - DNA, 26 bp, Homo sapiens
gctgcagccagaccgatggtggcacc

SEQ ID NO: 113531 - DNA, 26 bp, Homo sapiens
ctgcagccagaccgatggtggcaccc

SEQ ID NO: 113532 - DNA, 26 bp, Homo sapiens
tgcagccagaccgatggtggcaccca

SEQ ID NO: 113533 - DNA, 26 bp, Homo sapiens
gcagccagaccgatggtggcacccag

SEQ ID NO: 113534 - DNA, 26 bp, Homo sapiens
cagccagaccgatggtggcacccaga

SEQ ID NO: 113535 - DNA, 26 bp, Homo sapiens
agccagaccgatggtggcacccagag

SEQ ID NO: 113536 - DNA, 26 bp, Homo sapiens
gccagaccgatggtggcacccagaga

SEQ ID NO: 113537 - DNA, 26 bp, Homo sapiens
ccagaccgatggtggcacccagagat

SEQ ID NO: 113538 - DNA, 26 bp, Homo sapiens
cagaccgatggtggcacccagagatg

SEQ ID NO: 113539 - DNA, 26 bp, Homo sapiens
agaccgatggtggcacccagagatga

SEQ ID NO: 113540 - DNA, 26 bp, Homo sapiens
gaccgatggtggcacccagagatgac

SEQ ID NO: 113541 - DNA, 26 bp, Homo sapiens
accgatggtggcacccagagatgaca

SEQ ID NO: 113542 - DNA, 26 bp, Homo sapiens
ccgatggtggcacccagagatgacag

SEQ ID NO: 113543 - DNA, 26 bp, Homo sapiens
cgatggtggcacccagagatgacagc

SEQ ID NO: 113544 - DNA, 26 bp, Homo sapiens
gatggtggcacccagagatgacagct

SEQ ID NO: 113545 - DNA, 26 bp, Homo sapiens
atggtggcacccagagatgacagctg

SEQ ID NO: 113546 - DNA, 26 bp, Homo sapiens
tggtggcacccagagatgacagctgc

SEQ ID NO: 113547 - DNA, 26 bp, Homo sapiens
ggtggcacccagagatgacagctgct

SEQ ID NO: 113548 - DNA, 26 bp, Homo sapiens
gtggcacccagagatgacagctgctg

SEQ ID NO: 113549 - DNA, 26 bp, Homo sapiens
tggcacccagagatgacagctgctgg

SEQ ID NO: 113550 - DNA, 26 bp, Homo sapiens
ggcacccagagatgacagctgctgga

SEQ ID NO: 113551 - DNA, 26 bp, Homo sapiens
gcacccagagatgacagctgctggag

SEQ ID NO: 113552 - DNA, 26 bp, Homo sapiens
cacccagagatgacagctgctggagc

SEQ ID NO: 113553 - DNA, 26 bp, Homo sapiens
acccagagatgacagctgctggagca

SEQ ID NO: 113554 - DNA, 26 bp, Homo sapiens
cccagagatgacagctgctggagcag

SEQ ID NO: 113555 - DNA, 26 bp, Homo sapiens
ccagagatgacagctgctggagcagg

SEQ ID NO: 113556 - DNA, 26 bp, Homo sapiens
cagagatgacagctgctggagcaggg

SEQ ID NO: 113557 - DNA, 26 bp, Homo sapiens
agagatgacagctgctggagcagggg

SEQ ID NO: 113558 - DNA, 26 bp, Homo sapiens
gagatgacagctgctggagcaggggc

SEQ ID NO: 113559 - DNA, 26 bp, Homo sapiens
agatgacagctgctggagcaggggct

SEQ ID NO: 113560 - DNA, 26 bp, Homo sapiens
gatgacagctgctggagcaggggctg

SEQ ID NO: 113561 - DNA, 26 bp, Homo sapiens
atgacagctgctggagcaggggctgg

SEQ ID NO: 113562 - DNA, 26 bp, Homo sapiens
tgacagctgctggagcaggggctggg

SEQ ID NO: 113563 - DNA, 26 bp, Homo sapiens
gacagctgctggagcaggggctgggg

SEQ ID NO: 113564 - DNA, 26 bp, Homo sapiens
acagctgctggagcaggggctggggg

SEQ ID NO: 113565 - DNA, 26 bp, Homo sapiens
cagctgctggagcaggggctggggga

SEQ ID NO: 113566 - DNA, 26 bp, Homo sapiens
agctgctggagcaggggctgggggaa

SEQ ID NO: 113567 - DNA, 26 bp, Homo sapiens
gctgctggagcaggggctgggggaat

SEQ ID NO: 113568 - DNA, 26 bp, Homo sapiens
ctgctggagcaggggctgggggaatt

SEQ ID NO: 113569 - DNA, 26 bp, Homo sapiens
tgctggagcaggggctgggggaattg

SEQ ID NO: 113570 - DNA, 26 bp, Homo sapiens
gctggagcaggggctgggggaattgg

SEQ ID NO: 113571 - DNA, 26 bp, Homo sapiens
ctggagcaggggctgggggaattggg

SEQ ID NO: 113572 - DNA, 26 bp, Homo sapiens
tggagcaggggctgggggaattgggg

SEQ ID NO: 113573 - DNA, 26 bp, Homo sapiens
ggagcaggggctgggggaattggggc

SEQ ID NO: 113574 - DNA, 26 bp, Homo sapiens
gagcaggggctgggggaattggggca

SEQ ID NO: 113575 - DNA, 26 bp, Homo sapiens
agcaggggctgggggaattggggcag

SEQ ID NO: 113576 - DNA, 26 bp, Homo sapiens
gcaggggctgggggaattggggcagg

SEQ ID NO: 113577 - DNA, 26 bp, Homo sapiens
caggggctgggggaattggggcaggc

SEQ ID NO: 113578 - DNA, 26 bp, Homo sapiens
aggggctgggggaattggggcaggct

SEQ ID NO: 113579 - DNA, 26 bp, Homo sapiens
ggggctgggggaattggggcaggctg

SEQ ID NO: 113580 - DNA, 26 bp, Homo sapiens
gggctgggggaattggggcaggctgt

SEQ ID NO: 113581 - DNA, 26 bp, Homo sapiens
ggctgggggaattggggcaggctgtg

SEQ ID NO: 113582 - DNA, 26 bp, Homo sapiens
gctgggggaattggggcaggctgtgc

SEQ ID NO: 113583 - DNA, 26 bp, Homo sapiens
ctgggggaattggggcaggctgtgct

SEQ ID NO: 113584 - DNA, 26 bp, Homo sapiens
tgggggaattggggcaggctgtgctg

SEQ ID NO: 113585 - DNA, 26 bp, Homo sapiens
gggggaattggggcaggctgtgctgg

SEQ ID NO: 113586 - DNA, 26 bp, Homo sapiens
ggggaattggggcaggctgtgctggt

SEQ ID NO: 113587 - DNA, 26 bp, Homo sapiens
gggaattggggcaggctgtgctggtt

SEQ ID NO: 113588 - DNA, 26 bp, Homo sapiens
ggaattggggcaggctgtgctggttg

SEQ ID NO: 113589 - DNA, 26 bp, Homo sapiens
gaattggggcaggctgtgctggttga

SEQ ID NO: 113590 - DNA, 26 bp, Homo sapiens
aattggggcaggctgtgctggttgag

SEQ ID NO: 113591 - DNA, 26 bp, Homo sapiens
attggggcaggctgtgctggttgagg

SEQ ID NO: 113592 - DNA, 26 bp, Homo sapiens
ttggggcaggctgtgctggttgaggg

SEQ ID NO: 113593 - DNA, 26 bp, Homo sapiens
tggggcaggctgtgctggttgagggc

SEQ ID NO: 113594 - DNA, 26 bp, Homo sapiens
ggggcaggctgtgctggttgagggca

SEQ ID NO: 113595 - DNA, 26 bp, Homo sapiens
gggcaggctgtgctggttgagggcac

SEQ ID NO: 113596 - DNA, 26 bp, Homo sapiens
ggcaggctgtgctggttgagggcaca

SEQ ID NO: 113597 - DNA, 26 bp, Homo sapiens
gcaggctgtgctggttgagggcacac

SEQ ID NO: 113598 - DNA, 26 bp, Homo sapiens
caggctgtgctggttgagggcacact

SEQ ID NO: 113599 - DNA, 26 bp, Homo sapiens
aggctgtgctggttgagggcacactg

SEQ ID NO: 113600 - DNA, 26 bp, Homo sapiens
ggctgtgctggttgagggcacactga

SEQ ID NO: 113601 - DNA, 26 bp, Homo sapiens
gctgtgctggttgagggcacactgac

SEQ ID NO: 113602 - DNA, 26 bp, Homo sapiens
ctgtgctggttgagggcacactgact

SEQ ID NO: 113603 - DNA, 26 bp, Homo sapiens
tgtgctggttgagggcacactgactt

SEQ ID NO: 113604 - DNA, 26 bp, Homo sapiens
gtgctggttgagggcacactgacttt

SEQ ID NO: 113605 - DNA, 26 bp, Homo sapiens
tgctggttgagggcacactgacttta

SEQ ID NO: 113606 - DNA, 26 bp, Homo sapiens
gctggttgagggcacactgactttaa

SEQ ID NO: 113607 - DNA, 26 bp, Homo sapiens
ctggttgagggcacactgactttaag

SEQ ID NO: 113608 - DNA, 26 bp, Homo sapiens
tggttgagggcacactgactttaagg

SEQ ID NO: 113609 - DNA, 26 bp, Homo sapiens
ggttgagggcacactgactttaaggc

SEQ ID NO: 113610 - DNA, 26 bp, Homo sapiens
gttgagggcacactgactttaaggct

SEQ ID NO: 113611 - DNA, 26 bp, Homo sapiens
ttgagggcacactgactttaaggctt

SEQ ID NO: 113612 - DNA, 26 bp, Homo sapiens
tgagggcacactgactttaaggcttg

SEQ ID NO: 113613 - DNA, 26 bp, Homo sapiens
gagggcacactgactttaaggcttga

SEQ ID NO: 113614 - DNA, 26 bp, Homo sapiens
agggcacactgactttaaggcttgaa

SEQ ID NO: 113615 - DNA, 26 bp, Homo sapiens
gggcacactgactttaaggcttgaag

SEQ ID NO: 113616 - DNA, 26 bp, Homo sapiens
ggcacactgactttaaggcttgaagc

SEQ ID NO: 113617 - DNA, 26 bp, Homo sapiens
gcacactgactttaaggcttgaagcc

SEQ ID NO: 113618 - DNA, 26 bp, Homo sapiens
cacactgactttaaggcttgaagcct

SEQ ID NO: 113619 - DNA, 26 bp, Homo sapiens
acactgactttaaggcttgaagcctc

SEQ ID NO: 113620 - DNA, 26 bp, Homo sapiens
cactgactttaaggcttgaagcctca

SEQ ID NO: 113621 - DNA, 26 bp, Homo sapiens
actgactttaaggcttgaagcctcac

SEQ ID NO: 113622 - DNA, 26 bp, Homo sapiens
ctgactttaaggcttgaagcctcacc

SEQ ID NO: 113623 - DNA, 26 bp, Homo sapiens
tgactttaaggcttgaagcctcacca

SEQ ID NO: 113624 - DNA, 26 bp, Homo sapiens
gactttaaggcttgaagcctcaccac

SEQ ID NO: 113625 - DNA, 26 bp, Homo sapiens
actttaaggcttgaagcctcaccact

SEQ ID NO: 113626 - DNA, 26 bp, Homo sapiens
ctttaaggcttgaagcctcaccactc

SEQ ID NO: 113627 - DNA, 26 bp, Homo sapiens
tttaaggcttgaagcctcaccactca

SEQ ID NO: 113628 - DNA, 26 bp, Homo sapiens
ttaaggcttgaagcctcaccactcag

SEQ ID NO: 113629 - DNA, 26 bp, Homo sapiens
taaggcttgaagcctcaccactcaga

SEQ ID NO: 113630 - DNA, 26 bp, Homo sapiens
aaggcttgaagcctcaccactcagag

SEQ ID NO: 113631 - DNA, 26 bp, Homo sapiens
aggcttgaagcctcaccactcagagc

SEQ ID NO: 113632 - DNA, 26 bp, Homo sapiens
ggcttgaagcctcaccactcagagca

SEQ ID NO: 113633 - DNA, 26 bp, Homo sapiens
gcttgaagcctcaccactcagagcat

SEQ ID NO: 113634 - DNA, 26 bp, Homo sapiens
cttgaagcctcaccactcagagcatg

SEQ ID NO: 113635 - DNA, 26 bp, Homo sapiens
ttgaagcctcaccactcagagcatga

SEQ ID NO: 113636 - DNA, 26 bp, Homo sapiens
tgaagcctcaccactcagagcatgag

SEQ ID NO: 113637 - DNA, 26 bp, Homo sapiens
gaagcctcaccactcagagcatgagg

SEQ ID NO: 113638 - DNA, 26 bp, Homo sapiens
aagcctcaccactcagagcatgaggg

SEQ ID NO: 113639 - DNA, 26 bp, Homo sapiens
agcctcaccactcagagcatgaggga

SEQ ID NO: 113640 - DNA, 26 bp, Homo sapiens
gcctcaccactcagagcatgagggag

SEQ ID NO: 113641 - DNA, 26 bp, Homo sapiens
cctcaccactcagagcatgagggagt

SEQ ID NO: 113642 - DNA, 26 bp, Homo sapiens
ctcaccactcagagcatgagggagtc

SEQ ID NO: 113643 - DNA, 26 bp, Homo sapiens
tcaccactcagagcatgagggagtca

SEQ ID NO: 113644 - DNA, 26 bp, Homo sapiens
caccactcagagcatgagggagtcac

SEQ ID NO: 113645 - DNA, 26 bp, Homo sapiens
accactcagagcatgagggagtcaca

SEQ ID NO: 113646 - DNA, 26 bp, Homo sapiens
ccactcagagcatgagggagtcacac

SEQ ID NO: 113647 - DNA, 26 bp, Homo sapiens
cactcagagcatgagggagtcacacc

SEQ ID NO: 113648 - DNA, 26 bp, Homo sapiens
actcagagcatgagggagtcacacct

SEQ ID NO: 113649 - DNA, 26 bp, Homo sapiens
ctcagagcatgagggagtcacacctc

SEQ ID NO: 113650 - DNA, 26 bp, Homo sapiens
tcagagcatgagggagtcacacctca

SEQ ID NO: 113651 - DNA, 26 bp, Homo sapiens
cagagcatgagggagtcacacctcat

SEQ ID NO: 113652 - DNA, 26 bp, Homo sapiens
agagcatgagggagtcacacctcatc

SEQ ID NO: 113653 - DNA, 26 bp, Homo sapiens
gagcatgagggagtcacacctcatct

SEQ ID NO: 113654 - DNA, 26 bp, Homo sapiens
agcatgagggagtcacacctcatctt

SEQ ID NO: 113655 - DNA, 26 bp, Homo sapiens
gcatgagggagtcacacctcatcttt

SEQ ID NO: 113656 - DNA, 26 bp, Homo sapiens
catgagggagtcacacctcatcttta

SEQ ID NO: 113657 - DNA, 26 bp, Homo sapiens
atgagggagtcacacctcatctttaa

SEQ ID NO: 113658 - DNA, 26 bp, Homo sapiens
tgagggagtcacacctcatctttaac

SEQ ID NO: 113659 - DNA, 26 bp, Homo sapiens
gagggagtcacacctcatctttaact

SEQ ID NO: 113660 - DNA, 26 bp, Homo sapiens
agggagtcacacctcatctttaactg

SEQ ID NO: 113661 - DNA, 26 bp, Homo sapiens
gggagtcacacctcatctttaactga

SEQ ID NO: 113662 - DNA, 26 bp, Homo sapiens
ggagtcacacctcatctttaactgat

SEQ ID NO: 113663 - DNA, 26 bp, Homo sapiens
gagtcacacctcatctttaactgatc

SEQ ID NO: 113664 - DNA, 26 bp, Homo sapiens
agtcacacctcatctttaactgatcc

SEQ ID NO: 113665 - DNA, 26 bp, Homo sapiens
gtcacacctcatctttaactgatcca

SEQ ID NO: 113666 - DNA, 26 bp, Homo sapiens
tcacacctcatctttaactgatccag

SEQ ID NO: 113667 - DNA, 26 bp, Homo sapiens
cacacctcatctttaactgatccaga

SEQ ID NO: 113668 - DNA, 26 bp, Homo sapiens
acacctcatctttaactgatccagag

SEQ ID NO: 113669 - DNA, 26 bp, Homo sapiens
cacctcatctttaactgatccagagt

SEQ ID NO: 113670 - DNA, 26 bp, Homo sapiens
acctcatctttaactgatccagagtc

SEQ ID NO: 113671 - DNA, 26 bp, Homo sapiens
cctcatctttaactgatccagagtca

SEQ ID NO: 113672 - DNA, 26 bp, Homo sapiens
ctcatctttaactgatccagagtcag

SEQ ID NO: 113673 - DNA, 26 bp, Homo sapiens
tcatctttaactgatccagagtcagc

SEQ ID NO: 113674 - DNA, 26 bp, Homo sapiens
catctttaactgatccagagtcagct

SEQ ID NO: 113675 - DNA, 26 bp, Homo sapiens
atctttaactgatccagagtcagctt

SEQ ID NO: 113676 - DNA, 26 bp, Homo sapiens
tctttaactgatccagagtcagctta

SEQ ID NO: 113677 - DNA, 26 bp, Homo sapiens
ctttaactgatccagagtcagcttat

SEQ ID NO: 113678 - DNA, 26 bp, Homo sapiens
tttaactgatccagagtcagcttatc

SEQ ID NO: 113679 - DNA, 26 bp, Homo sapiens
ttaactgatccagagtcagcttatca

SEQ ID NO: 113680 - DNA, 26 bp, Homo sapiens
taactgatccagagtcagcttatcac

SEQ ID NO: 113681 - DNA, 26 bp, Homo sapiens
aactgatccagagtcagcttatcacc

SEQ ID NO: 113682 - DNA, 26 bp, Homo sapiens
actgatccagagtcagcttatcacca

SEQ ID NO: 113683 - DNA, 26 bp, Homo sapiens
ctgatccagagtcagcttatcaccac

SEQ ID NO: 113684 - DNA, 26 bp, Homo sapiens
tgatccagagtcagcttatcaccaca

SEQ ID NO: 113685 - DNA, 26 bp, Homo sapiens
gatccagagtcagcttatcaccacag

SEQ ID NO: 113686 - DNA, 26 bp, Homo sapiens
atccagagtcagcttatcaccacagg

SEQ ID NO: 113687 - DNA, 26 bp, Homo sapiens
tccagagtcagcttatcaccacagga

SEQ ID NO: 113688 - DNA, 26 bp, Homo sapiens
ccagagtcagcttatcaccacaggag

SEQ ID NO: 113689 - DNA, 26 bp, Homo sapiens
cagagtcagcttatcaccacaggaga

SEQ ID NO: 113690 - DNA, 26 bp, Homo sapiens
agagtcagcttatcaccacaggagaa

SEQ ID NO: 113691 - DNA, 26 bp, Homo sapiens
gagtcagcttatcaccacaggagaag

SEQ ID NO: 113692 - DNA, 26 bp, Homo sapiens
agtcagcttatcaccacaggagaagg

SEQ ID NO: 113693 - DNA, 26 bp, Homo sapiens
gtcagcttatcaccacaggagaaggt

SEQ ID NO: 113694 - DNA, 26 bp, Homo sapiens
tcagcttatcaccacaggagaaggtg

SEQ ID NO: 113695 - DNA, 26 bp, Homo sapiens
cagcttatcaccacaggagaaggtga

SEQ ID NO: 113696 - DNA, 26 bp, Homo sapiens
agcttatcaccacaggagaaggtgag

SEQ ID NO: 113697 - DNA, 26 bp, Homo sapiens
gcttatcaccacaggagaaggtgagt

SEQ ID NO: 113698 - DNA, 26 bp, Homo sapiens
cttatcaccacaggagaaggtgagtg

SEQ ID NO: 113699 - DNA, 26 bp, Homo sapiens
ttatcaccacaggagaaggtgagtgg

SEQ ID NO: 113700 - DNA, 26 bp, Homo sapiens
tatcaccacaggagaaggtgagtggg

SEQ ID NO: 113701 - DNA, 26 bp, Homo sapiens
atcaccacaggagaaggtgagtgggt

SEQ ID NO: 113702 - DNA, 26 bp, Homo sapiens
tcaccacaggagaaggtgagtgggtg

SEQ ID NO: 113703 - DNA, 26 bp, Homo sapiens
caccacaggagaaggtgagtgggtga

SEQ ID NO: 113704 - DNA, 26 bp, Homo sapiens
accacaggagaaggtgagtgggtgaa

SEQ ID NO: 113705 - DNA, 26 bp, Homo sapiens
ccacaggagaaggtgagtgggtgaag

SEQ ID NO: 113706 - DNA, 26 bp, Homo sapiens
cacaggagaaggtgagtgggtgaaga

SEQ ID NO: 113707 - DNA, 26 bp, Homo sapiens
acaggagaaggtgagtgggtgaagag

SEQ ID NO: 113708 - DNA, 26 bp, Homo sapiens
caggagaaggtgagtgggtgaagaga

SEQ ID NO: 113709 - DNA, 26 bp, Homo sapiens
aggagaaggtgagtgggtgaagagaa

SEQ ID NO: 113710 - DNA, 26 bp, Homo sapiens
ggagaaggtgagtgggtgaagagaac

SEQ ID NO: 113711 - DNA, 26 bp, Homo sapiens
gagaaggtgagtgggtgaagagaact

SEQ ID NO: 113712 - DNA, 26 bp, Homo sapiens
agaaggtgagtgggtgaagagaactt

SEQ ID NO: 113713 - DNA, 26 bp, Homo sapiens
gaaggtgagtgggtgaagagaacttg

SEQ ID NO: 113714 - DNA, 26 bp, Homo sapiens
aaggtgagtgggtgaagagaacttga

SEQ ID NO: 113715 - DNA, 26 bp, Homo sapiens
aggtgagtgggtgaagagaacttgag

SEQ ID NO: 113716 - DNA, 26 bp, Homo sapiens
ggtgagtgggtgaagagaacttgagg

SEQ ID NO: 113717 - DNA, 26 bp, Homo sapiens
gtgagtgggtgaagagaacttgaggg

SEQ ID NO: 113718 - DNA, 26 bp, Homo sapiens
tgagtgggtgaagagaacttgagggg

SEQ ID NO: 113719 - DNA, 26 bp, Homo sapiens
gagtgggtgaagagaacttgagggga

SEQ ID NO: 113720 - DNA, 26 bp, Homo sapiens
agtgggtgaagagaacttgaggggaa

SEQ ID NO: 113721 - DNA, 26 bp, Homo sapiens
gtgggtgaagagaacttgaggggaaa

SEQ ID NO: 113722 - DNA, 26 bp, Homo sapiens
tgggtgaagagaacttgaggggaaaa

SEQ ID NO: 113723 - DNA, 26 bp, Homo sapiens
gggtgaagagaacttgaggggaaaac

SEQ ID NO: 113724 - DNA, 26 bp, Homo sapiens
ggtgaagagaacttgaggggaaaaca

SEQ ID NO: 113725 - DNA, 26 bp, Homo sapiens
gtgaagagaacttgaggggaaaacag

SEQ ID NO: 113726 - DNA, 26 bp, Homo sapiens
tgaagagaacttgaggggaaaacaga

SEQ ID NO: 113727 - DNA, 26 bp, Homo sapiens
gaagagaacttgaggggaaaacagaa

SEQ ID NO: 113728 - DNA, 26 bp, Homo sapiens
aagagaacttgaggggaaaacagaaa

SEQ ID NO: 113729 - DNA, 26 bp, Homo sapiens
agagaacttgaggggaaaacagaaag

SEQ ID NO: 113730 - DNA, 26 bp, Homo sapiens
gagaacttgaggggaaaacagaaagg

SEQ ID NO: 113731 - DNA, 26 bp, Homo sapiens
agaacttgaggggaaaacagaaaggg

SEQ ID NO: 113732 - DNA, 26 bp, Homo sapiens
gaacttgaggggaaaacagaaaggga

SEQ ID NO: 113733 - DNA, 26 bp, Homo sapiens
aacttgaggggaaaacagaaagggag

SEQ ID NO: 113734 - DNA, 26 bp, Homo sapiens
acttgaggggaaaacagaaagggaga

SEQ ID NO: 113735 - DNA, 26 bp, Homo sapiens
cttgaggggaaaacagaaagggagat

SEQ ID NO: 113736 - DNA, 26 bp, Homo sapiens
ttgaggggaaaacagaaagggagatg

SEQ ID NO: 113737 - DNA, 26 bp, Homo sapiens
tgaggggaaaacagaaagggagatgt

SEQ ID NO: 113738 - DNA, 26 bp, Homo sapiens
gaggggaaaacagaaagggagatgtg

SEQ ID NO: 113739 - DNA, 26 bp, Homo sapiens
aggggaaaacagaaagggagatgtgc

SEQ ID NO: 113740 - DNA, 26 bp, Homo sapiens
ggggaaaacagaaagggagatgtgct

SEQ ID NO: 113741 - DNA, 26 bp, Homo sapiens
gggaaaacagaaagggagatgtgctg

SEQ ID NO: 113742 - DNA, 26 bp, Homo sapiens
ggaaaacagaaagggagatgtgctga

SEQ ID NO: 113743 - DNA, 26 bp, Homo sapiens
gaaaacagaaagggagatgtgctgag

SEQ ID NO: 113744 - DNA, 26 bp, Homo sapiens
aaaacagaaagggagatgtgctgagg

SEQ ID NO: 113745 - DNA, 26 bp, Homo sapiens
aaacagaaagggagatgtgctgaggc

SEQ ID NO: 113746 - DNA, 26 bp, Homo sapiens
aacagaaagggagatgtgctgaggct

SEQ ID NO: 113747 - DNA, 26 bp, Homo sapiens
acagaaagggagatgtgctgaggctc

SEQ ID NO: 113748 - DNA, 26 bp, Homo sapiens
cagaaagggagatgtgctgaggctcc

SEQ ID NO: 113749 - DNA, 26 bp, Homo sapiens
agaaagggagatgtgctgaggctcca

SEQ ID NO: 113750 - DNA, 26 bp, Homo sapiens
gaaagggagatgtgctgaggctccag

SEQ ID NO: 113751 - DNA, 26 bp, Homo sapiens
aaagggagatgtgctgaggctccagt

SEQ ID NO: 113752 - DNA, 26 bp, Homo sapiens
aagggagatgtgctgaggctccagtt

SEQ ID NO: 113753 - DNA, 26 bp, Homo sapiens
agggagatgtgctgaggctccagttc

SEQ ID NO: 113754 - DNA, 26 bp, Homo sapiens
gggagatgtgctgaggctccagttct

SEQ ID NO: 113755 - DNA, 26 bp, Homo sapiens
ggagatgtgctgaggctccagttctt

SEQ ID NO: 113756 - DNA, 26 bp, Homo sapiens
gagatgtgctgaggctccagttcttc

SEQ ID NO: 113757 - DNA, 26 bp, Homo sapiens
agatgtgctgaggctccagttcttcc

SEQ ID NO: 113758 - DNA, 26 bp, Homo sapiens
gatgtgctgaggctccagttcttcca

SEQ ID NO: 113759 - DNA, 26 bp, Homo sapiens
atgtgctgaggctccagttcttccag

SEQ ID NO: 113760 - DNA, 26 bp, Homo sapiens
tgtgctgaggctccagttcttccaga

SEQ ID NO: 113761 - DNA, 26 bp, Homo sapiens
gtgctgaggctccagttcttccagag

SEQ ID NO: 113762 - DNA, 26 bp, Homo sapiens
tgctgaggctccagttcttccagaga

SEQ ID NO: 113763 - DNA, 26 bp, Homo sapiens
gctgaggctccagttcttccagagag

SEQ ID NO: 113764 - DNA, 26 bp, Homo sapiens
ctgaggctccagttcttccagagagt

SEQ ID NO: 113765 - DNA, 26 bp, Homo sapiens
tgaggctccagttcttccagagagtc

SEQ ID NO: 113766 - DNA, 26 bp, Homo sapiens
gaggctccagttcttccagagagtca

SEQ ID NO: 113767 - DNA, 26 bp, Homo sapiens
aggctccagttcttccagagagtcag

SEQ ID NO: 113768 - DNA, 26 bp, Homo sapiens
ggctccagttcttccagagagtcagc

SEQ ID NO: 113769 - DNA, 26 bp, Homo sapiens
gctccagttcttccagagagtcagcg

SEQ ID NO: 113770 - DNA, 26 bp, Homo sapiens
ctccagttcttccagagagtcagcga

SEQ ID NO: 113771 - DNA, 26 bp, Homo sapiens
tccagttcttccagagagtcagcgag

SEQ ID NO: 113772 - DNA, 26 bp, Homo sapiens
ccagttcttccagagagtcagcgaga

SEQ ID NO: 113773 - DNA, 26 bp, Homo sapiens
cagttcttccagagagtcagcgagag

SEQ ID NO: 113774 - DNA, 26 bp, Homo sapiens
agttcttccagagagtcagcgagagg

SEQ ID NO: 113775 - DNA, 26 bp, Homo sapiens
gttcttccagagagtcagcgagaggt

SEQ ID NO: 113776 - DNA, 26 bp, Homo sapiens
ttcttccagagagtcagcgagaggtg

SEQ ID NO: 113777 - DNA, 26 bp, Homo sapiens
tcttccagagagtcagcgagaggtgc

SEQ ID NO: 113778 - DNA, 26 bp, Homo sapiens
cttccagagagtcagcgagaggtgcc

SEQ ID NO: 113779 - DNA, 26 bp, Homo sapiens
ttccagagagtcagcgagaggtgcct

SEQ ID NO: 113780 - DNA, 26 bp, Homo sapiens
tccagagagtcagcgagaggtgcctc

SEQ ID NO: 113781 - DNA, 26 bp, Homo sapiens
ccagagagtcagcgagaggtgcctca

SEQ ID NO: 113782 - DNA, 26 bp, Homo sapiens
cagagagtcagcgagaggtgcctcat

SEQ ID NO: 113783 - DNA, 26 bp, Homo sapiens
agagagtcagcgagaggtgcctcatg

SEQ ID NO: 113784 - DNA, 26 bp, Homo sapiens
gagagtcagcgagaggtgcctcatgt

SEQ ID NO: 113785 - DNA, 26 bp, Homo sapiens
agagtcagcgagaggtgcctcatgtg

SEQ ID NO: 113786 - DNA, 26 bp, Homo sapiens
gagtcagcgagaggtgcctcatgtga

SEQ ID NO: 113787 - DNA, 26 bp, Homo sapiens
agtcagcgagaggtgcctcatgtgag

SEQ ID NO: 113788 - DNA, 26 bp, Homo sapiens
gtcagcgagaggtgcctcatgtgagg

SEQ ID NO: 113789 - DNA, 26 bp, Homo sapiens
tcagcgagaggtgcctcatgtgaggg

SEQ ID NO: 113790 - DNA, 26 bp, Homo sapiens
cagcgagaggtgcctcatgtgagggg

SEQ ID NO: 113791 - DNA, 26 bp, Homo sapiens
agcgagaggtgcctcatgtgagggga

SEQ ID NO: 113792 - DNA, 26 bp, Homo sapiens
gcgagaggtgcctcatgtgaggggag

SEQ ID NO: 113793 - DNA, 26 bp, Homo sapiens
cgagaggtgcctcatgtgaggggagg

SEQ ID NO: 113794 - DNA, 26 bp, Homo sapiens
gagaggtgcctcatgtgaggggaggt

SEQ ID NO: 113795 - DNA, 26 bp, Homo sapiens
agaggtgcctcatgtgaggggaggtc

SEQ ID NO: 113796 - DNA, 26 bp, Homo sapiens
gaggtgcctcatgtgaggggaggtca

SEQ ID NO: 113797 - DNA, 26 bp, Homo sapiens
aggtgcctcatgtgaggggaggtcat

SEQ ID NO: 113798 - DNA, 26 bp, Homo sapiens
ggtgcctcatgtgaggggaggtcatc

SEQ ID NO: 113799 - DNA, 26 bp, Homo sapiens
gtgcctcatgtgaggggaggtcatct

SEQ ID NO: 113800 - DNA, 26 bp, Homo sapiens
tgcctcatgtgaggggaggtcatcta

SEQ ID NO: 113801 - DNA, 26 bp, Homo sapiens
gcctcatgtgaggggaggtcatctat

SEQ ID NO: 113802 - DNA, 26 bp, Homo sapiens
cctcatgtgaggggaggtcatctatg

SEQ ID NO: 113803 - DNA, 26 bp, Homo sapiens
ctcatgtgaggggaggtcatctatgt

SEQ ID NO: 113804 - DNA, 26 bp, Homo sapiens
tcatgtgaggggaggtcatctatgtt

SEQ ID NO: 113805 - DNA, 26 bp, Homo sapiens
catgtgaggggaggtcatctatgttg

SEQ ID NO: 113806 - DNA, 26 bp, Homo sapiens
atgtgaggggaggtcatctatgttgg

SEQ ID NO: 113807 - DNA, 26 bp, Homo sapiens
tgtgaggggaggtcatctatgttgga

SEQ ID NO: 113808 - DNA, 26 bp, Homo sapiens
gtgaggggaggtcatctatgttggag

SEQ ID NO: 113809 - DNA, 26 bp, Homo sapiens
tgaggggaggtcatctatgttggagg

SEQ ID NO: 113810 - DNA, 26 bp, Homo sapiens
gaggggaggtcatctatgttggaggg

SEQ ID NO: 113811 - DNA, 26 bp, Homo sapiens
aggggaggtcatctatgttggagggt

SEQ ID NO: 113812 - DNA, 26 bp, Homo sapiens
ggggaggtcatctatgttggagggta

SEQ ID NO: 113813 - DNA, 26 bp, Homo sapiens
gggaggtcatctatgttggagggtaa

SEQ ID NO: 113814 - DNA, 26 bp, Homo sapiens
ggaggtcatctatgttggagggtaag

SEQ ID NO: 113815 - DNA, 26 bp, Homo sapiens
gaggtcatctatgttggagggtaagt

SEQ ID NO: 113816 - DNA, 26 bp, Homo sapiens
aggtcatctatgttggagggtaagta

SEQ ID NO: 113817 - DNA, 26 bp, Homo sapiens
ggtcatctatgttggagggtaagtag

SEQ ID NO: 113818 - DNA, 26 bp, Homo sapiens
gtcatctatgttggagggtaagtagc

SEQ ID NO: 113819 - DNA, 26 bp, Homo sapiens
tcatctatgttggagggtaagtagcc

SEQ ID NO: 113820 - DNA, 26 bp, Homo sapiens
catctatgttggagggtaagtagcca

SEQ ID NO: 113821 - DNA, 26 bp, Homo sapiens
atctatgttggagggtaagtagccat

SEQ ID NO: 113822 - DNA, 26 bp, Homo sapiens
tctatgttggagggtaagtagccatc

SEQ ID NO: 113823 - DNA, 26 bp, Homo sapiens
ctatgttggagggtaagtagccatca

SEQ ID NO: 113824 - DNA, 26 bp, Homo sapiens
tatgttggagggtaagtagccatcat

SEQ ID NO: 113825 - DNA, 26 bp, Homo sapiens
atgttggagggtaagtagccatcatg

SEQ ID NO: 113826 - DNA, 26 bp, Homo sapiens
tgttggagggtaagtagccatcatgg

SEQ ID NO: 113827 - DNA, 26 bp, Homo sapiens
gttggagggtaagtagccatcatggg

SEQ ID NO: 113828 - DNA, 26 bp, Homo sapiens
ttggagggtaagtagccatcatgggt

SEQ ID NO: 113829 - DNA, 26 bp, Homo sapiens
tggagggtaagtagccatcatgggtg

SEQ ID NO: 113830 - DNA, 26 bp, Homo sapiens
ggagggtaagtagccatcatgggtgg

SEQ ID NO: 113831 - DNA, 26 bp, Homo sapiens
gagggtaagtagccatcatgggtggg

SEQ ID NO: 113832 - DNA, 26 bp, Homo sapiens
agggtaagtagccatcatgggtggga

SEQ ID NO: 113833 - DNA, 26 bp, Homo sapiens
gggtaagtagccatcatgggtgggaa

SEQ ID NO: 113834 - DNA, 26 bp, Homo sapiens
ggtaagtagccatcatgggtgggaag

SEQ ID NO: 113835 - DNA, 26 bp, Homo sapiens
gtaagtagccatcatgggtgggaagg

SEQ ID NO: 113836 - DNA, 26 bp, Homo sapiens
taagtagccatcatgggtgggaaggt

SEQ ID NO: 113837 - DNA, 26 bp, Homo sapiens
aagtagccatcatgggtgggaaggtc

SEQ ID NO: 113838 - DNA, 26 bp, Homo sapiens
agtagccatcatgggtgggaaggtca

SEQ ID NO: 113839 - DNA, 26 bp, Homo sapiens
gtagccatcatgggtgggaaggtcac

SEQ ID NO: 113840 - DNA, 26 bp, Homo sapiens
tagccatcatgggtgggaaggtcacc

SEQ ID NO: 113841 - DNA, 26 bp, Homo sapiens
agccatcatgggtgggaaggtcacct

SEQ ID NO: 113842 - DNA, 26 bp, Homo sapiens
gccatcatgggtgggaaggtcacctg

SEQ ID NO: 113843 - DNA, 26 bp, Homo sapiens
ccatcatgggtgggaaggtcacctgc

SEQ ID NO: 113844 - DNA, 26 bp, Homo sapiens
catcatgggtgggaaggtcacctgct

SEQ ID NO: 113845 - DNA, 26 bp, Homo sapiens
atcatgggtgggaaggtcacctgctg

SEQ ID NO: 113846 - DNA, 26 bp, Homo sapiens
tcatgggtgggaaggtcacctgctgg

SEQ ID NO: 113847 - DNA, 26 bp, Homo sapiens
catgggtgggaaggtcacctgctggg

SEQ ID NO: 113848 - DNA, 26 bp, Homo sapiens
atgggtgggaaggtcacctgctggga

SEQ ID NO: 113849 - DNA, 26 bp, Homo sapiens
tgggtgggaaggtcacctgctgggag

SEQ ID NO: 113850 - DNA, 26 bp, Homo sapiens
gggtgggaaggtcacctgctgggagc

SEQ ID NO: 113851 - DNA, 26 bp, Homo sapiens
ggtgggaaggtcacctgctgggagca

SEQ ID NO: 113852 - DNA, 26 bp, Homo sapiens
gtgggaaggtcacctgctgggagcac

SEQ ID NO: 113853 - DNA, 26 bp, Homo sapiens
tgggaaggtcacctgctgggagcacc

SEQ ID NO: 113854 - DNA, 26 bp, Homo sapiens
gggaaggtcacctgctgggagcaccg

SEQ ID NO: 113855 - DNA, 26 bp, Homo sapiens
ggaaggtcacctgctgggagcaccgt

SEQ ID NO: 113856 - DNA, 26 bp, Homo sapiens
gaaggtcacctgctgggagcaccgtc

SEQ ID NO: 113857 - DNA, 26 bp, Homo sapiens
aaggtcacctgctgggagcaccgtcc

SEQ ID NO: 113858 - DNA, 26 bp, Homo sapiens
aggtcacctgctgggagcaccgtcca

SEQ ID NO: 113859 - DNA, 26 bp, Homo sapiens
ggtcacctgctgggagcaccgtccag

SEQ ID NO: 113860 - DNA, 26 bp, Homo sapiens
gtcacctgctgggagcaccgtccagg

SEQ ID NO: 113861 - DNA, 26 bp, Homo sapiens
tcacctgctgggagcaccgtccaggg

SEQ ID NO: 113862 - DNA, 26 bp, Homo sapiens
cacctgctgggagcaccgtccaggga

SEQ ID NO: 113863 - DNA, 26 bp, Homo sapiens
acctgctgggagcaccgtccagggac

SEQ ID NO: 113864 - DNA, 26 bp, Homo sapiens
cctgctgggagcaccgtccagggaca

SEQ ID NO: 113865 - DNA, 26 bp, Homo sapiens
ctgctgggagcaccgtccagggacag

SEQ ID NO: 113866 - DNA, 26 bp, Homo sapiens
tgctgggagcaccgtccagggacagg

SEQ ID NO: 113867 - DNA, 26 bp, Homo sapiens
gctgggagcaccgtccagggacaggc

SEQ ID NO: 113868 - DNA, 26 bp, Homo sapiens
ctgggagcaccgtccagggacaggct

SEQ ID NO: 113869 - DNA, 26 bp, Homo sapiens
tgggagcaccgtccagggacaggctg

SEQ ID NO: 113870 - DNA, 26 bp, Homo sapiens
gggagcaccgtccagggacaggctgg

SEQ ID NO: 113871 - DNA, 26 bp, Homo sapiens
ggagcaccgtccagggacaggctggg

SEQ ID NO: 113872 - DNA, 26 bp, Homo sapiens
gagcaccgtccagggacaggctgggt

SEQ ID NO: 113873 - DNA, 26 bp, Homo sapiens
agcaccgtccagggacaggctgggtt

SEQ ID NO: 113874 - DNA, 26 bp, Homo sapiens
gcaccgtccagggacaggctgggttt

SEQ ID NO: 113875 - DNA, 26 bp, Homo sapiens
caccgtccagggacaggctgggtttt

SEQ ID NO: 113876 - DNA, 26 bp, Homo sapiens
accgtccagggacaggctgggttttc

SEQ ID NO: 113877 - DNA, 26 bp, Homo sapiens
ccgtccagggacaggctgggttttcg

SEQ ID NO: 113878 - DNA, 26 bp, Homo sapiens
cgtccagggacaggctgggttttcgg

SEQ ID NO: 113879 - DNA, 26 bp, Homo sapiens
gtccagggacaggctgggttttcggg

SEQ ID NO: 113880 - DNA, 26 bp, Homo sapiens
tccagggacaggctgggttttcgggc

SEQ ID NO: 113881 - DNA, 26 bp, Homo sapiens
ccagggacaggctgggttttcgggct

SEQ ID NO: 113882 - DNA, 26 bp, Homo sapiens
cagggacaggctgggttttcgggctt

SEQ ID NO: 113883 - DNA, 26 bp, Homo sapiens
agggacaggctgggttttcgggcttt

SEQ ID NO: 113884 - DNA, 26 bp, Homo sapiens
gggacaggctgggttttcgggctttg

SEQ ID NO: 113885 - DNA, 26 bp, Homo sapiens
ggacaggctgggttttcgggctttgg

SEQ ID NO: 113886 - DNA, 26 bp, Homo sapiens
gacaggctgggttttcgggctttggg

SEQ ID NO: 113887 - DNA, 26 bp, Homo sapiens
acaggctgggttttcgggctttgggt

SEQ ID NO: 113888 - DNA, 26 bp, Homo sapiens
caggctgggttttcgggctttgggtc

SEQ ID NO: 113889 - DNA, 26 bp, Homo sapiens
aggctgggttttcgggctttgggtcg

SEQ ID NO: 113890 - DNA, 26 bp, Homo sapiens
ggctgggttttcgggctttgggtcgg

SEQ ID NO: 113891 - DNA, 26 bp, Homo sapiens
gctgggttttcgggctttgggtcgga

SEQ ID NO: 113892 - DNA, 26 bp, Homo sapiens
ctgggttttcgggctttgggtcggag

SEQ ID NO: 113893 - DNA, 26 bp, Homo sapiens
tgggttttcgggctttgggtcggagc

SEQ ID NO: 113894 - DNA, 26 bp, Homo sapiens
gggttttcgggctttgggtcggagcc

SEQ ID NO: 113895 - DNA, 26 bp, Homo sapiens
ggttttcgggctttgggtcggagccc

SEQ ID NO: 113896 - DNA, 26 bp, Homo sapiens
gttttcgggctttgggtcggagcccc

SEQ ID NO: 113897 - DNA, 26 bp, Homo sapiens
ttttcgggctttgggtcggagcccct

SEQ ID NO: 113898 - DNA, 26 bp, Homo sapiens
tttcgggctttgggtcggagcccctg

SEQ ID NO: 113899 - DNA, 26 bp, Homo sapiens
ttcgggctttgggtcggagcccctgc

SEQ ID NO: 113900 - DNA, 26 bp, Homo sapiens
tcgggctttgggtcggagcccctgct

SEQ ID NO: 113901 - DNA, 26 bp, Homo sapiens
cgggctttgggtcggagcccctgctc

SEQ ID NO: 113902 - DNA, 26 bp, Homo sapiens
gggctttgggtcggagcccctgctct

SEQ ID NO: 113903 - DNA, 26 bp, Homo sapiens
ggctttgggtcggagcccctgctctc

SEQ ID NO: 113904 - DNA, 26 bp, Homo sapiens
gctttgggtcggagcccctgctctcc

SEQ ID NO: 113905 - DNA, 26 bp, Homo sapiens
ctttgggtcggagcccctgctctcca

SEQ ID NO: 113906 - DNA, 26 bp, Homo sapiens
tttgggtcggagcccctgctctccag

SEQ ID NO: 113907 - DNA, 26 bp, Homo sapiens
ttgggtcggagcccctgctctccagc

SEQ ID NO: 113908 - DNA, 26 bp, Homo sapiens
tgggtcggagcccctgctctccagca

SEQ ID NO: 113909 - DNA, 26 bp, Homo sapiens
gggtcggagcccctgctctccagcac

SEQ ID NO: 113910 - DNA, 26 bp, Homo sapiens
ggtcggagcccctgctctccagcacc

SEQ ID NO: 113911 - DNA, 26 bp, Homo sapiens
gtcggagcccctgctctccagcacct

SEQ ID NO: 113912 - DNA, 26 bp, Homo sapiens
tcggagcccctgctctccagcacctt

SEQ ID NO: 113913 - DNA, 26 bp, Homo sapiens
cggagcccctgctctccagcaccttg

SEQ ID NO: 113914 - DNA, 26 bp, Homo sapiens
ggagcccctgctctccagcaccttgt

SEQ ID NO: 113915 - DNA, 26 bp, Homo sapiens
gagcccctgctctccagcaccttgta

SEQ ID NO: 113916 - DNA, 26 bp, Homo sapiens
agcccctgctctccagcaccttgtac

SEQ ID NO: 113917 - DNA, 26 bp, Homo sapiens
gcccctgctctccagcaccttgtaca

SEQ ID NO: 113918 - DNA, 26 bp, Homo sapiens
cccctgctctccagcaccttgtacag

SEQ ID NO: 113919 - DNA, 26 bp, Homo sapiens
ccctgctctccagcaccttgtacaga

SEQ ID NO: 113920 - DNA, 26 bp, Homo sapiens
cctgctctccagcaccttgtacagat

SEQ ID NO: 113921 - DNA, 26 bp, Homo sapiens
ctgctctccagcaccttgtacagatc

SEQ ID NO: 113922 - DNA, 26 bp, Homo sapiens
tgctctccagcaccttgtacagatcc

SEQ ID NO: 113923 - DNA, 26 bp, Homo sapiens
gctctccagcaccttgtacagatcca

SEQ ID NO: 113924 - DNA, 26 bp, Homo sapiens
ctctccagcaccttgtacagatccac

SEQ ID NO: 113925 - DNA, 26 bp, Homo sapiens
tctccagcaccttgtacagatccacc

SEQ ID NO: 113926 - DNA, 26 bp, Homo sapiens
ctccagcaccttgtacagatccacca

SEQ ID NO: 113927 - DNA, 26 bp, Homo sapiens
tccagcaccttgtacagatccaccag

SEQ ID NO: 113928 - DNA, 26 bp, Homo sapiens
ccagcaccttgtacagatccaccagt

SEQ ID NO: 113929 - DNA, 26 bp, Homo sapiens
cagcaccttgtacagatccaccagtt

SEQ ID NO: 113930 - DNA, 26 bp, Homo sapiens
agcaccttgtacagatccaccagttg

SEQ ID NO: 113931 - DNA, 26 bp, Homo sapiens
gcaccttgtacagatccaccagttgt

SEQ ID NO: 113932 - DNA, 26 bp, Homo sapiens
caccttgtacagatccaccagttgtc

SEQ ID NO: 113933 - DNA, 26 bp, Homo sapiens
accttgtacagatccaccagttgtct

SEQ ID NO: 113934 - DNA, 26 bp, Homo sapiens
ccttgtacagatccaccagttgtctg

SEQ ID NO: 113935 - DNA, 26 bp, Homo sapiens
cttgtacagatccaccagttgtctgc

SEQ ID NO: 113936 - DNA, 26 bp, Homo sapiens
ttgtacagatccaccagttgtctgct

SEQ ID NO: 113937 - DNA, 26 bp, Homo sapiens
tgtacagatccaccagttgtctgctc

SEQ ID NO: 113938 - DNA, 26 bp, Homo sapiens
gtacagatccaccagttgtctgctct

SEQ ID NO: 113939 - DNA, 26 bp, Homo sapiens
tacagatccaccagttgtctgctctc

SEQ ID NO: 113940 - DNA, 26 bp, Homo sapiens
acagatccaccagttgtctgctctca

SEQ ID NO: 113941 - DNA, 26 bp, Homo sapiens
cagatccaccagttgtctgctctcag

SEQ ID NO: 113942 - DNA, 26 bp, Homo sapiens
agatccaccagttgtctgctctcagc

SEQ ID NO: 113943 - DNA, 26 bp, Homo sapiens
gatccaccagttgtctgctctcagct

SEQ ID NO: 113944 - DNA, 26 bp, Homo sapiens
atccaccagttgtctgctctcagctt

SEQ ID NO: 113945 - DNA, 26 bp, Homo sapiens
tccaccagttgtctgctctcagcttg

SEQ ID NO: 113946 - DNA, 26 bp, Homo sapiens
ccaccagttgtctgctctcagcttgg

SEQ ID NO: 113947 - DNA, 26 bp, Homo sapiens
caccagttgtctgctctcagcttgga

SEQ ID NO: 113948 - DNA, 26 bp, Homo sapiens
accagttgtctgctctcagcttggag

SEQ ID NO: 113949 - DNA, 26 bp, Homo sapiens
ccagttgtctgctctcagcttggaga

SEQ ID NO: 113950 - DNA, 26 bp, Homo sapiens
cagttgtctgctctcagcttggagag

SEQ ID NO: 113951 - DNA, 26 bp, Homo sapiens
agttgtctgctctcagcttggagagc

SEQ ID NO: 113952 - DNA, 26 bp, Homo sapiens
gttgtctgctctcagcttggagagct

SEQ ID NO: 113953 - DNA, 26 bp, Homo sapiens
ttgtctgctctcagcttggagagctc

SEQ ID NO: 113954 - DNA, 26 bp, Homo sapiens
tgtctgctctcagcttggagagctct

SEQ ID NO: 113955 - DNA, 26 bp, Homo sapiens
gtctgctctcagcttggagagctctt

SEQ ID NO: 113956 - DNA, 26 bp, Homo sapiens
tctgctctcagcttggagagctcttg

SEQ ID NO: 113957 - DNA, 26 bp, Homo sapiens
ctgctctcagcttggagagctcttgg

SEQ ID NO: 113958 - DNA, 26 bp, Homo sapiens
tgctctcagcttggagagctcttgga

SEQ ID NO: 113959 - DNA, 26 bp, Homo sapiens
gctctcagcttggagagctcttggag

SEQ ID NO: 113960 - DNA, 26 bp, Homo sapiens
ctctcagcttggagagctcttggagg

SEQ ID NO: 113961 - DNA, 26 bp, Homo sapiens
tctcagcttggagagctcttggaggt

SEQ ID NO: 113962 - DNA, 26 bp, Homo sapiens
ctcagcttggagagctcttggaggtg

SEQ ID NO: 113963 - DNA, 26 bp, Homo sapiens
tcagcttggagagctcttggaggtgg

SEQ ID NO: 113964 - DNA, 26 bp, Homo sapiens
cagcttggagagctcttggaggtggt

SEQ ID NO: 113965 - DNA, 26 bp, Homo sapiens
agcttggagagctcttggaggtggtg

SEQ ID NO: 113966 - DNA, 26 bp, Homo sapiens
gcttggagagctcttggaggtggtgg

SEQ ID NO: 113967 - DNA, 26 bp, Homo sapiens
cttggagagctcttggaggtggtggg

SEQ ID NO: 113968 - DNA, 26 bp, Homo sapiens
ttggagagctcttggaggtggtgggc

SEQ ID NO: 113969 - DNA, 26 bp, Homo sapiens
tggagagctcttggaggtggtgggct

SEQ ID NO: 113970 - DNA, 26 bp, Homo sapiens
ggagagctcttggaggtggtgggctt

SEQ ID NO: 113971 - DNA, 26 bp, Homo sapiens
gagagctcttggaggtggtgggcttg

SEQ ID NO: 113972 - DNA, 26 bp, Homo sapiens
agagctcttggaggtggtgggcttga

SEQ ID NO: 113973 - DNA, 26 bp, Homo sapiens
gagctcttggaggtggtgggcttgag

SEQ ID NO: 113974 - DNA, 26 bp, Homo sapiens
agctcttggaggtggtgggcttgagg

SEQ ID NO: 113975 - DNA, 26 bp, Homo sapiens
gctcttggaggtggtgggcttgaggc

SEQ ID NO: 113976 - DNA, 26 bp, Homo sapiens
ctcttggaggtggtgggcttgaggca

SEQ ID NO: 113977 - DNA, 26 bp, Homo sapiens
tcttggaggtggtgggcttgaggcac

SEQ ID NO: 113978 - DNA, 26 bp, Homo sapiens
cttggaggtggtgggcttgaggcact

SEQ ID NO: 113979 - DNA, 26 bp, Homo sapiens
ttggaggtggtgggcttgaggcactg

SEQ ID NO: 113980 - DNA, 26 bp, Homo sapiens
tggaggtggtgggcttgaggcactgt

SEQ ID NO: 113981 - DNA, 26 bp, Homo sapiens
ggaggtggtgggcttgaggcactgtg

SEQ ID NO: 113982 - DNA, 26 bp, Homo sapiens
gaggtggtgggcttgaggcactgtgc

SEQ ID NO: 113983 - DNA, 26 bp, Homo sapiens
aggtggtgggcttgaggcactgtgca

SEQ ID NO: 113984 - DNA, 26 bp, Homo sapiens
ggtggtgggcttgaggcactgtgcat

SEQ ID NO: 113985 - DNA, 26 bp, Homo sapiens
gtggtgggcttgaggcactgtgcatc

SEQ ID NO: 113986 - DNA, 26 bp, Homo sapiens
tggtgggcttgaggcactgtgcatca

SEQ ID NO: 113987 - DNA, 26 bp, Homo sapiens
ggtgggcttgaggcactgtgcatcat

SEQ ID NO: 113988 - DNA, 26 bp, Homo sapiens
gtgggcttgaggcactgtgcatcatg

SEQ ID NO: 113989 - DNA, 26 bp, Homo sapiens
tgggcttgaggcactgtgcatcatgt

SEQ ID NO: 113990 - DNA, 26 bp, Homo sapiens
gggcttgaggcactgtgcatcatgtc

SEQ ID NO: 113991 - DNA, 26 bp, Homo sapiens
ggcttgaggcactgtgcatcatgtct

SEQ ID NO: 113992 - DNA, 26 bp, Homo sapiens
gcttgaggcactgtgcatcatgtctt

SEQ ID NO: 113993 - DNA, 26 bp, Homo sapiens
cttgaggcactgtgcatcatgtcttt

SEQ ID NO: 113994 - DNA, 26 bp, Homo sapiens
ttgaggcactgtgcatcatgtctttc

SEQ ID NO: 113995 - DNA, 26 bp, Homo sapiens
tgaggcactgtgcatcatgtctttct

SEQ ID NO: 113996 - DNA, 26 bp, Homo sapiens
gaggcactgtgcatcatgtctttctc

SEQ ID NO: 113997 - DNA, 26 bp, Homo sapiens
aggcactgtgcatcatgtctttctca

SEQ ID NO: 113998 - DNA, 26 bp, Homo sapiens
ggcactgtgcatcatgtctttctcag

SEQ ID NO: 113999 - DNA, 26 bp, Homo sapiens
gcactgtgcatcatgtctttctcaga

SEQ ID NO: 114000 - DNA, 26 bp, Homo sapiens
cactgtgcatcatgtctttctcagag

SEQ ID NO: 114001 - DNA, 26 bp, Homo sapiens
actgtgcatcatgtctttctcagagg

SEQ ID NO: 114002 - DNA, 26 bp, Homo sapiens
ctgtgcatcatgtctttctcagaggc

SEQ ID NO: 114003 - DNA, 26 bp, Homo sapiens
tgtgcatcatgtctttctcagaggcc

SEQ ID NO: 114004 - DNA, 26 bp, Homo sapiens
gtgcatcatgtctttctcagaggcct

SEQ ID NO: 114005 - DNA, 26 bp, Homo sapiens
tgcatcatgtctttctcagaggcctg

SEQ ID NO: 114006 - DNA, 26 bp, Homo sapiens
gcatcatgtctttctcagaggcctga

SEQ ID NO: 114007 - DNA, 26 bp, Homo sapiens
catcatgtctttctcagaggcctgat

SEQ ID NO: 114008 - DNA, 26 bp, Homo sapiens
atcatgtctttctcagaggcctgatg

SEQ ID NO: 114009 - DNA, 26 bp, Homo sapiens
tcatgtctttctcagaggcctgatga

SEQ ID NO: 114010 - DNA, 26 bp, Homo sapiens
catgtctttctcagaggcctgatgac

SEQ ID NO: 114011 - DNA, 26 bp, Homo sapiens
atgtctttctcagaggcctgatgacc

SEQ ID NO: 114012 - DNA, 26 bp, Homo sapiens
tgtctttctcagaggcctgatgacct

SEQ ID NO: 114013 - DNA, 26 bp, Homo sapiens
gtctttctcagaggcctgatgacctt

SEQ ID NO: 114014 - DNA, 26 bp, Homo sapiens
tctttctcagaggcctgatgaccttg

SEQ ID NO: 114015 - DNA, 26 bp, Homo sapiens
ctttctcagaggcctgatgaccttgg

SEQ ID NO: 114016 - DNA, 26 bp, Homo sapiens
tttctcagaggcctgatgaccttgga

SEQ ID NO: 114017 - DNA, 26 bp, Homo sapiens
ttctcagaggcctgatgaccttggat

SEQ ID NO: 114018 - DNA, 26 bp, Homo sapiens
tctcagaggcctgatgaccttggatt

SEQ ID NO: 114019 - DNA, 26 bp, Homo sapiens
ctcagaggcctgatgaccttggattc

SEQ ID NO: 114020 - DNA, 26 bp, Homo sapiens
tcagaggcctgatgaccttggattcc

SEQ ID NO: 114021 - DNA, 26 bp, Homo sapiens
cagaggcctgatgaccttggattcct

SEQ ID NO: 114022 - DNA, 26 bp, Homo sapiens
agaggcctgatgaccttggattcctt

SEQ ID NO: 114023 - DNA, 26 bp, Homo sapiens
gaggcctgatgaccttggattccttt

SEQ ID NO: 114024 - DNA, 26 bp, Homo sapiens
aggcctgatgaccttggattcctttt

SEQ ID NO: 114025 - DNA, 26 bp, Homo sapiens
ggcctgatgaccttggattccttttt

SEQ ID NO: 114026 - DNA, 26 bp, Homo sapiens
gcctgatgaccttggattcctttttc

SEQ ID NO: 114027 - DNA, 26 bp, Homo sapiens
cctgatgaccttggattcctttttcc

SEQ ID NO: 114028 - DNA, 26 bp, Homo sapiens
ctgatgaccttggattcctttttccc

SEQ ID NO: 114029 - DNA, 26 bp, Homo sapiens
tgatgaccttggattcctttttccct

SEQ ID NO: 114030 - DNA, 26 bp, Homo sapiens
gatgaccttggattcctttttccctt

SEQ ID NO: 114031 - DNA, 26 bp, Homo sapiens
atgaccttggattcctttttcccttt

SEQ ID NO: 114032 - DNA, 26 bp, Homo sapiens
tgaccttggattcctttttccctttg

SEQ ID NO: 114033 - DNA, 26 bp, Homo sapiens
gaccttggattcctttttccctttgt

SEQ ID NO: 114034 - DNA, 26 bp, Homo sapiens
accttggattcctttttccctttgtg

SEQ ID NO: 114035 - DNA, 26 bp, Homo sapiens
ccttggattcctttttccctttgtgg

SEQ ID NO: 114036 - DNA, 26 bp, Homo sapiens
cttggattcctttttccctttgtggc

SEQ ID NO: 114037 - DNA, 26 bp, Homo sapiens
ttggattcctttttccctttgtggcc

SEQ ID NO: 114038 - DNA, 26 bp, Homo sapiens
tggattcctttttccctttgtggcca

SEQ ID NO: 114039 - DNA, 26 bp, Homo sapiens
ggattcctttttccctttgtggccag

SEQ ID NO: 114040 - DNA, 26 bp, Homo sapiens
gattcctttttccctttgtggccagt

SEQ ID NO: 114041 - DNA, 26 bp, Homo sapiens
attcctttttccctttgtggccagtt

SEQ ID NO: 114042 - DNA, 26 bp, Homo sapiens
ttcctttttccctttgtggccagttg

SEQ ID NO: 114043 - DNA, 26 bp, Homo sapiens
tcctttttccctttgtggccagttgg

SEQ ID NO: 114044 - DNA, 26 bp, Homo sapiens
cctttttccctttgtggccagttgga

SEQ ID NO: 114045 - DNA, 26 bp, Homo sapiens
ctttttccctttgtggccagttggag

SEQ ID NO: 114046 - DNA, 26 bp, Homo sapiens
tttttccctttgtggccagttggagc

SEQ ID NO: 114047 - DNA, 26 bp, Homo sapiens
ttttccctttgtggccagttggagca

SEQ ID NO: 114048 - DNA, 26 bp, Homo sapiens
tttccctttgtggccagttggagcag

SEQ ID NO: 114049 - DNA, 26 bp, Homo sapiens
ttccctttgtggccagttggagcagg

SEQ ID NO: 114050 - DNA, 26 bp, Homo sapiens
tccctttgtggccagttggagcaggg

SEQ ID NO: 114051 - DNA, 26 bp, Homo sapiens
ccctttgtggccagttggagcagggg

SEQ ID NO: 114052 - DNA, 26 bp, Homo sapiens
cctttgtggccagttggagcaggggg

SEQ ID NO: 114053 - DNA, 26 bp, Homo sapiens
ctttgtggccagttggagcagggggg

SEQ ID NO: 114054 - DNA, 26 bp, Homo sapiens
tttgtggccagttggagcagggggga

SEQ ID NO: 114055 - DNA, 26 bp, Homo sapiens
ttgtggccagttggagcaggggggat

SEQ ID NO: 114056 - DNA, 26 bp, Homo sapiens
tgtggccagttggagcaggggggatg

SEQ ID NO: 114057 - DNA, 26 bp, Homo sapiens
gtggccagttggagcaggggggatgt

SEQ ID NO: 114058 - DNA, 26 bp, Homo sapiens
tggccagttggagcaggggggatgtc

SEQ ID NO: 114059 - DNA, 26 bp, Homo sapiens
ggccagttggagcaggggggatgtct

SEQ ID NO: 114060 - DNA, 26 bp, Homo sapiens
gccagttggagcaggggggatgtctg

SEQ ID NO: 114061 - DNA, 26 bp, Homo sapiens
ccagttggagcaggggggatgtctga

SEQ ID NO: 114062 - DNA, 26 bp, Homo sapiens
cagttggagcaggggggatgtctgaa

SEQ ID NO: 114063 - DNA, 26 bp, Homo sapiens
agttggagcaggggggatgtctgaaa

SEQ ID NO: 114064 - DNA, 26 bp, Homo sapiens
gttggagcaggggggatgtctgaaaa

SEQ ID NO: 114065 - DNA, 26 bp, Homo sapiens
ttggagcaggggggatgtctgaaaac

SEQ ID NO: 114066 - DNA, 26 bp, Homo sapiens
tggagcaggggggatgtctgaaaact

SEQ ID NO: 114067 - DNA, 26 bp, Homo sapiens
ggagcaggggggatgtctgaaaactg

SEQ ID NO: 114068 - DNA, 26 bp, Homo sapiens
gagcaggggggatgtctgaaaactgg

SEQ ID NO: 114069 - DNA, 26 bp, Homo sapiens
agcaggggggatgtctgaaaactggg

SEQ ID NO: 114070 - DNA, 26 bp, Homo sapiens
gcaggggggatgtctgaaaactgggg

SEQ ID NO: 114071 - DNA, 26 bp, Homo sapiens
caggggggatgtctgaaaactggggt

SEQ ID NO: 114072 - DNA, 26 bp, Homo sapiens
aggggggatgtctgaaaactggggtc

SEQ ID NO: 114073 - DNA, 26 bp, Homo sapiens
ggggggatgtctgaaaactggggtca

SEQ ID NO: 114074 - DNA, 26 bp, Homo sapiens
gggggatgtctgaaaactggggtcac

SEQ ID NO: 114075 - DNA, 26 bp, Homo sapiens
ggggatgtctgaaaactggggtcact

SEQ ID NO: 114076 - DNA, 26 bp, Homo sapiens
gggatgtctgaaaactggggtcactt

SEQ ID NO: 114077 - DNA, 26 bp, Homo sapiens
ggatgtctgaaaactggggtcacttg

SEQ ID NO: 114078 - DNA, 26 bp, Homo sapiens
gatgtctgaaaactggggtcacttga

SEQ ID NO: 114079 - DNA, 26 bp, Homo sapiens
atgtctgaaaactggggtcacttgat

SEQ ID NO: 114080 - DNA, 26 bp, Homo sapiens
tgtctgaaaactggggtcacttgatg

SEQ ID NO: 114081 - DNA, 26 bp, Homo sapiens
gtctgaaaactggggtcacttgatga

SEQ ID NO: 114082 - DNA, 26 bp, Homo sapiens
tctgaaaactggggtcacttgatgaa

SEQ ID NO: 114083 - DNA, 26 bp, Homo sapiens
ctgaaaactggggtcacttgatgaag

SEQ ID NO: 114084 - DNA, 26 bp, Homo sapiens
tgaaaactggggtcacttgatgaagg

SEQ ID NO: 114085 - DNA, 26 bp, Homo sapiens
gaaaactggggtcacttgatgaagga

SEQ ID NO: 114086 - DNA, 26 bp, Homo sapiens
aaaactggggtcacttgatgaaggac

SEQ ID NO: 114087 - DNA, 26 bp, Homo sapiens
aaactggggtcacttgatgaaggact

SEQ ID NO: 114088 - DNA, 26 bp, Homo sapiens
aactggggtcacttgatgaaggactt

SEQ ID NO: 114089 - DNA, 26 bp, Homo sapiens
actggggtcacttgatgaaggacttc

SEQ ID NO: 114090 - DNA, 26 bp, Homo sapiens
ctggggtcacttgatgaaggacttca

SEQ ID NO: 114091 - DNA, 26 bp, Homo sapiens
tggggtcacttgatgaaggacttcac

SEQ ID NO: 114092 - DNA, 26 bp, Homo sapiens
ggggtcacttgatgaaggacttcact

SEQ ID NO: 114093 - DNA, 26 bp, Homo sapiens
gggtcacttgatgaaggacttcactg

SEQ ID NO: 114094 - DNA, 26 bp, Homo sapiens
ggtcacttgatgaaggacttcactga

SEQ ID NO: 114095 - DNA, 26 bp, Homo sapiens
gtcacttgatgaaggacttcactgat

SEQ ID NO: 114096 - DNA, 26 bp, Homo sapiens
tcacttgatgaaggacttcactgatg

SEQ ID NO: 114097 - DNA, 26 bp, Homo sapiens
cacttgatgaaggacttcactgatga

SEQ ID NO: 114098 - DNA, 26 bp, Homo sapiens
acttgatgaaggacttcactgatgac

SEQ ID NO: 114099 - DNA, 26 bp, Homo sapiens
cttgatgaaggacttcactgatgacc

SEQ ID NO: 114100 - DNA, 26 bp, Homo sapiens
ttgatgaaggacttcactgatgacca

SEQ ID NO: 114101 - DNA, 26 bp, Homo sapiens
tgatgaaggacttcactgatgaccag

SEQ ID NO: 114102 - DNA, 26 bp, Homo sapiens
gatgaaggacttcactgatgaccagc

SEQ ID NO: 114103 - DNA, 26 bp, Homo sapiens
atgaaggacttcactgatgaccagcg

SEQ ID NO: 114104 - DNA, 26 bp, Homo sapiens
tgaaggacttcactgatgaccagcgg

SEQ ID NO: 114105 - DNA, 26 bp, Homo sapiens
gaaggacttcactgatgaccagcggt

SEQ ID NO: 114106 - DNA, 26 bp, Homo sapiens
aaggacttcactgatgaccagcggtt

SEQ ID NO: 114107 - DNA, 26 bp, Homo sapiens
aggacttcactgatgaccagcggttc

SEQ ID NO: 114108 - DNA, 26 bp, Homo sapiens
ggacttcactgatgaccagcggttca

SEQ ID NO: 114109 - DNA, 26 bp, Homo sapiens
gacttcactgatgaccagcggttcag

SEQ ID NO: 114110 - DNA, 26 bp, Homo sapiens
acttcactgatgaccagcggttcagg

SEQ ID NO: 114111 - DNA, 26 bp, Homo sapiens
cttcactgatgaccagcggttcagga

SEQ ID NO: 114112 - DNA, 26 bp, Homo sapiens
ttcactgatgaccagcggttcaggat

SEQ ID NO: 114113 - DNA, 26 bp, Homo sapiens
tcactgatgaccagcggttcaggatc

SEQ ID NO: 114114 - DNA, 26 bp, Homo sapiens
cactgatgaccagcggttcaggatct

SEQ ID NO: 114115 - DNA, 26 bp, Homo sapiens
actgatgaccagcggttcaggatctt

SEQ ID NO: 114116 - DNA, 26 bp, Homo sapiens
ctgatgaccagcggttcaggatcttc

SEQ ID NO: 114117 - DNA, 26 bp, Homo sapiens
tgatgaccagcggttcaggatcttca

SEQ ID NO: 114118 - DNA, 26 bp, Homo sapiens
gatgaccagcggttcaggatcttcag

SEQ ID NO: 114119 - DNA, 26 bp, Homo sapiens
atgaccagcggttcaggatcttcagg

SEQ ID NO: 114120 - DNA, 26 bp, Homo sapiens
tgaccagcggttcaggatcttcaggc

SEQ ID NO: 114121 - DNA, 26 bp, Homo sapiens
gaccagcggttcaggatcttcaggcg

SEQ ID NO: 114122 - DNA, 26 bp, Homo sapiens
accagcggttcaggatcttcaggcgt

SEQ ID NO: 114123 - DNA, 26 bp, Homo sapiens
ccagcggttcaggatcttcaggcgtg

SEQ ID NO: 114124 - DNA, 26 bp, Homo sapiens
cagcggttcaggatcttcaggcgtgg

SEQ ID NO: 114125 - DNA, 26 bp, Homo sapiens
agcggttcaggatcttcaggcgtggg

SEQ ID NO: 114126 - DNA, 26 bp, Homo sapiens
gcggttcaggatcttcaggcgtgggc

SEQ ID NO: 114127 - DNA, 26 bp, Homo sapiens
cggttcaggatcttcaggcgtgggcc

SEQ ID NO: 114128 - DNA, 26 bp, Homo sapiens
ggttcaggatcttcaggcgtgggcca

SEQ ID NO: 114129 - DNA, 26 bp, Homo sapiens
gttcaggatcttcaggcgtgggccag

SEQ ID NO: 114130 - DNA, 26 bp, Homo sapiens
ttcaggatcttcaggcgtgggccagt

SEQ ID NO: 114131 - DNA, 26 bp, Homo sapiens
tcaggatcttcaggcgtgggccagtc

SEQ ID NO: 114132 - DNA, 26 bp, Homo sapiens
caggatcttcaggcgtgggccagtct

SEQ ID NO: 114133 - DNA, 26 bp, Homo sapiens
aggatcttcaggcgtgggccagtcta

SEQ ID NO: 114134 - DNA, 26 bp, Homo sapiens
ggatcttcaggcgtgggccagtctat

SEQ ID NO: 114135 - DNA, 26 bp, Homo sapiens
gatcttcaggcgtgggccagtctatc

SEQ ID NO: 114136 - DNA, 26 bp, Homo sapiens
atcttcaggcgtgggccagtctatca

SEQ ID NO: 114137 - DNA, 26 bp, Homo sapiens
tcttcaggcgtgggccagtctatcag

SEQ ID NO: 114138 - DNA, 26 bp, Homo sapiens
cttcaggcgtgggccagtctatcagg

SEQ ID NO: 114139 - DNA, 26 bp, Homo sapiens
ttcaggcgtgggccagtctatcagga

SEQ ID NO: 114140 - DNA, 26 bp, Homo sapiens
tcaggcgtgggccagtctatcaggag

SEQ ID NO: 114141 - DNA, 26 bp, Homo sapiens
caggcgtgggccagtctatcaggagc

SEQ ID NO: 114142 - DNA, 26 bp, Homo sapiens
aggcgtgggccagtctatcaggagcc

SEQ ID NO: 114143 - DNA, 26 bp, Homo sapiens
ggcgtgggccagtctatcaggagcct

SEQ ID NO: 114144 - DNA, 26 bp, Homo sapiens
gcgtgggccagtctatcaggagcctg

SEQ ID NO: 114145 - DNA, 26 bp, Homo sapiens
cgtgggccagtctatcaggagcctgt

SEQ ID NO: 114146 - DNA, 26 bp, Homo sapiens
gtgggccagtctatcaggagcctgtc

SEQ ID NO: 114147 - DNA, 26 bp, Homo sapiens
tgggccagtctatcaggagcctgtcc

SEQ ID NO: 114148 - DNA, 26 bp, Homo sapiens
gggccagtctatcaggagcctgtcca

SEQ ID NO: 114149 - DNA, 26 bp, Homo sapiens
ggccagtctatcaggagcctgtccaa

SEQ ID NO: 114150 - DNA, 26 bp, Homo sapiens
gccagtctatcaggagcctgtccaag

SEQ ID NO: 114151 - DNA, 26 bp, Homo sapiens
ccagtctatcaggagcctgtccaagg

SEQ ID NO: 114152 - DNA, 26 bp, Homo sapiens
cagtctatcaggagcctgtccaaggg

SEQ ID NO: 114153 - DNA, 26 bp, Homo sapiens
agtctatcaggagcctgtccaagggc

SEQ ID NO: 114154 - DNA, 26 bp, Homo sapiens
gtctatcaggagcctgtccaagggca

SEQ ID NO: 114155 - DNA, 26 bp, Homo sapiens
tctatcaggagcctgtccaagggcag

SEQ ID NO: 114156 - DNA, 26 bp, Homo sapiens
ctatcaggagcctgtccaagggcagc

SEQ ID NO: 114157 - DNA, 26 bp, Homo sapiens
tatcaggagcctgtccaagggcagct

SEQ ID NO: 114158 - DNA, 26 bp, Homo sapiens
atcaggagcctgtccaagggcagctg

SEQ ID NO: 114159 - DNA, 26 bp, Homo sapiens
tcaggagcctgtccaagggcagctgt

SEQ ID NO: 114160 - DNA, 26 bp, Homo sapiens
caggagcctgtccaagggcagctgtg

SEQ ID NO: 114161 - DNA, 26 bp, Homo sapiens
aggagcctgtccaagggcagctgtgt

SEQ ID NO: 114162 - DNA, 26 bp, Homo sapiens
ggagcctgtccaagggcagctgtgtc

SEQ ID NO: 114163 - DNA, 26 bp, Homo sapiens
gagcctgtccaagggcagctgtgtct

SEQ ID NO: 114164 - DNA, 26 bp, Homo sapiens
agcctgtccaagggcagctgtgtctt

SEQ ID NO: 114165 - DNA, 26 bp, Homo sapiens
gcctgtccaagggcagctgtgtcttc

SEQ ID NO: 114166 - DNA, 26 bp, Homo sapiens
cctgtccaagggcagctgtgtcttct

SEQ ID NO: 114167 - DNA, 26 bp, Homo sapiens
ctgtccaagggcagctgtgtcttctc

SEQ ID NO: 114168 - DNA, 26 bp, Homo sapiens
tgtccaagggcagctgtgtcttctcc

SEQ ID NO: 114169 - DNA, 26 bp, Homo sapiens
gtccaagggcagctgtgtcttctcct

SEQ ID NO: 114170 - DNA, 26 bp, Homo sapiens
tccaagggcagctgtgtcttctcctc

SEQ ID NO: 114171 - DNA, 26 bp, Homo sapiens
ccaagggcagctgtgtcttctcctct

SEQ ID NO: 114172 - DNA, 26 bp, Homo sapiens
caagggcagctgtgtcttctcctctg

SEQ ID NO: 114173 - DNA, 26 bp, Homo sapiens
aagggcagctgtgtcttctcctctgc

SEQ ID NO: 114174 - DNA, 26 bp, Homo sapiens
agggcagctgtgtcttctcctctgca

SEQ ID NO: 114175 - DNA, 26 bp, Homo sapiens
gggcagctgtgtcttctcctctgcaa

SEQ ID NO: 114176 - DNA, 26 bp, Homo sapiens
ggcagctgtgtcttctcctctgcaat

SEQ ID NO: 114177 - DNA, 26 bp, Homo sapiens
gcagctgtgtcttctcctctgcaatg

SEQ ID NO: 114178 - DNA, 26 bp, Homo sapiens
cagctgtgtcttctcctctgcaatgg

SEQ ID NO: 114179 - DNA, 26 bp, Homo sapiens
agctgtgtcttctcctctgcaatggg

SEQ ID NO: 114180 - DNA, 26 bp, Homo sapiens
gctgtgtcttctcctctgcaatggga

SEQ ID NO: 114181 - DNA, 26 bp, Homo sapiens
ctgtgtcttctcctctgcaatgggat

SEQ ID NO: 114182 - DNA, 26 bp, Homo sapiens
tgtgtcttctcctctgcaatgggata

SEQ ID NO: 114183 - DNA, 26 bp, Homo sapiens
gtgtcttctcctctgcaatgggatat

SEQ ID NO: 114184 - DNA, 26 bp, Homo sapiens
tgtcttctcctctgcaatgggatatt

SEQ ID NO: 114185 - DNA, 26 bp, Homo sapiens
gtcttctcctctgcaatgggatattt

SEQ ID NO: 114186 - DNA, 26 bp, Homo sapiens
tcttctcctctgcaatgggatatttc

SEQ ID NO: 114187 - DNA, 26 bp, Homo sapiens
cttctcctctgcaatgggatatttct

SEQ ID NO: 114188 - DNA, 26 bp, Homo sapiens
ttctcctctgcaatgggatatttctt

SEQ ID NO: 114189 - DNA, 26 bp, Homo sapiens
tctcctctgcaatgggatatttctta

SEQ ID NO: 114190 - DNA, 26 bp, Homo sapiens
ctcctctgcaatgggatatttcttag

SEQ ID NO: 114191 - DNA, 26 bp, Homo sapiens
tcctctgcaatgggatatttcttagc

SEQ ID NO: 114192 - DNA, 26 bp, Homo sapiens
cctctgcaatgggatatttcttagcg

SEQ ID NO: 114193 - DNA, 26 bp, Homo sapiens
ctctgcaatgggatatttcttagcgc

SEQ ID NO: 114194 - DNA, 26 bp, Homo sapiens
tctgcaatgggatatttcttagcgca

SEQ ID NO: 114195 - DNA, 26 bp, Homo sapiens
ctgcaatgggatatttcttagcgcaa

SEQ ID NO: 114196 - DNA, 26 bp, Homo sapiens
tgcaatgggatatttcttagcgcaag

SEQ ID NO: 114197 - DNA, 26 bp, Homo sapiens
gcaatgggatatttcttagcgcaagt

SEQ ID NO: 114198 - DNA, 26 bp, Homo sapiens
caatgggatatttcttagcgcaagtg

SEQ ID NO: 114199 - DNA, 26 bp, Homo sapiens
aatgggatatttcttagcgcaagtgc

SEQ ID NO: 114200 - DNA, 26 bp, Homo sapiens
atgggatatttcttagcgcaagtgct

SEQ ID NO: 114201 - DNA, 26 bp, Homo sapiens
tgggatatttcttagcgcaagtgcta

SEQ ID NO: 114202 - DNA, 26 bp, Homo sapiens
gggatatttcttagcgcaagtgctat

SEQ ID NO: 114203 - DNA, 26 bp, Homo sapiens
ggatatttcttagcgcaagtgctatt

SEQ ID NO: 114204 - DNA, 26 bp, Homo sapiens
gatatttcttagcgcaagtgctattt

SEQ ID NO: 114205 - DNA, 26 bp, Homo sapiens
atatttcttagcgcaagtgctatttg

SEQ ID NO: 114206 - DNA, 26 bp, Homo sapiens
tatttcttagcgcaagtgctatttgc

SEQ ID NO: 114207 - DNA, 26 bp, Homo sapiens
atttcttagcgcaagtgctatttgct

SEQ ID NO: 114208 - DNA, 26 bp, Homo sapiens
tttcttagcgcaagtgctatttgctg

SEQ ID NO: 114209 - DNA, 26 bp, Homo sapiens
ttcttagcgcaagtgctatttgctgg

SEQ ID NO: 114210 - DNA, 26 bp, Homo sapiens
tcttagcgcaagtgctatttgctgga

SEQ ID NO: 114211 - DNA, 26 bp, Homo sapiens
cttagcgcaagtgctatttgctggat

SEQ ID NO: 114212 - DNA, 26 bp, Homo sapiens
ttagcgcaagtgctatttgctggatc

SEQ ID NO: 114213 - DNA, 26 bp, Homo sapiens
tagcgcaagtgctatttgctggatct

SEQ ID NO: 114214 - DNA, 26 bp, Homo sapiens
agcgcaagtgctatttgctggatctg

SEQ ID NO: 114215 - DNA, 26 bp, Homo sapiens
gcgcaagtgctatttgctggatctgg

SEQ ID NO: 114216 - DNA, 26 bp, Homo sapiens
cgcaagtgctatttgctggatctgga

SEQ ID NO: 114217 - DNA, 26 bp, Homo sapiens
gcaagtgctatttgctggatctggaa

SEQ ID NO: 114218 - DNA, 26 bp, Homo sapiens
caagtgctatttgctggatctggaat

SEQ ID NO: 114219 - DNA, 26 bp, Homo sapiens
aagtgctatttgctggatctggaatt

SEQ ID NO: 114220 - DNA, 26 bp, Homo sapiens
agtgctatttgctggatctggaattt

SEQ ID NO: 114221 - DNA, 26 bp, Homo sapiens
gtgctatttgctggatctggaatttc

SEQ ID NO: 114222 - DNA, 26 bp, Homo sapiens
tgctatttgctggatctggaatttct

SEQ ID NO: 114223 - DNA, 26 bp, Homo sapiens
gctatttgctggatctggaatttctc

SEQ ID NO: 114224 - DNA, 26 bp, Homo sapiens
ctatttgctggatctggaatttctct

SEQ ID NO: 114225 - DNA, 26 bp, Homo sapiens
tatttgctggatctggaatttctctg

SEQ ID NO: 114226 - DNA, 26 bp, Homo sapiens
atttgctggatctggaatttctctgc

SEQ ID NO: 114227 - DNA, 26 bp, Homo sapiens
tttgctggatctggaatttctctgct

SEQ ID NO: 114228 - DNA, 26 bp, Homo sapiens
ttgctggatctggaatttctctgcta

SEQ ID NO: 114229 - DNA, 26 bp, Homo sapiens
tgctggatctggaatttctctgctac

SEQ ID NO: 114230 - DNA, 26 bp, Homo sapiens
gctggatctggaatttctctgctaca

SEQ ID NO: 114231 - DNA, 26 bp, Homo sapiens
ctggatctggaatttctctgctacac

SEQ ID NO: 114232 - DNA, 26 bp, Homo sapiens
tggatctggaatttctctgctacacc

SEQ ID NO: 114233 - DNA, 26 bp, Homo sapiens
ggatctggaatttctctgctacacca

SEQ ID NO: 114234 - DNA, 26 bp, Homo sapiens
gatctggaatttctctgctacaccac

SEQ ID NO: 114235 - DNA, 26 bp, Homo sapiens
atctggaatttctctgctacaccact

SEQ ID NO: 114236 - DNA, 26 bp, Homo sapiens
tctggaatttctctgctacaccactg

SEQ ID NO: 114237 - DNA, 26 bp, Homo sapiens
ctggaatttctctgctacaccactga

SEQ ID NO: 114238 - DNA, 26 bp, Homo sapiens
tggaatttctctgctacaccactgag

SEQ ID NO: 114239 - DNA, 26 bp, Homo sapiens
ggaatttctctgctacaccactgagg

SEQ ID NO: 114240 - DNA, 26 bp, Homo sapiens
gaatttctctgctacaccactgaggt

SEQ ID NO: 114241 - DNA, 26 bp, Homo sapiens
aatttctctgctacaccactgaggtc

SEQ ID NO: 114242 - DNA, 26 bp, Homo sapiens
atttctctgctacaccactgaggtct

SEQ ID NO: 114243 - DNA, 26 bp, Homo sapiens
tttctctgctacaccactgaggtctg

SEQ ID NO: 114244 - DNA, 26 bp, Homo sapiens
ttctctgctacaccactgaggtctga

SEQ ID NO: 114245 - DNA, 26 bp, Homo sapiens
tctctgctacaccactgaggtctgag

SEQ ID NO: 114246 - DNA, 26 bp, Homo sapiens
ctctgctacaccactgaggtctgagg

SEQ ID NO: 114247 - DNA, 26 bp, Homo sapiens
tctgctacaccactgaggtctgaggg

SEQ ID NO: 114248 - DNA, 26 bp, Homo sapiens
ctgctacaccactgaggtctgagggc

SEQ ID NO: 114249 - DNA, 26 bp, Homo sapiens
tgctacaccactgaggtctgagggct

SEQ ID NO: 114250 - DNA, 26 bp, Homo sapiens
gctacaccactgaggtctgagggctg

SEQ ID NO: 114251 - DNA, 26 bp, Homo sapiens
ctacaccactgaggtctgagggctgc

SEQ ID NO: 114252 - DNA, 26 bp, Homo sapiens
tacaccactgaggtctgagggctgct

SEQ ID NO: 114253 - DNA, 26 bp, Homo sapiens
acaccactgaggtctgagggctgcta

SEQ ID NO: 114254 - DNA, 26 bp, Homo sapiens
caccactgaggtctgagggctgctag

SEQ ID NO: 114255 - DNA, 26 bp, Homo sapiens
accactgaggtctgagggctgctagg

SEQ ID NO: 114256 - DNA, 26 bp, Homo sapiens
ccactgaggtctgagggctgctagga

SEQ ID NO: 114257 - DNA, 26 bp, Homo sapiens
cactgaggtctgagggctgctaggag

SEQ ID NO: 114258 - DNA, 26 bp, Homo sapiens
actgaggtctgagggctgctaggaga

SEQ ID NO: 114259 - DNA, 26 bp, Homo sapiens
ctgaggtctgagggctgctaggagaa

SEQ ID NO: 114260 - DNA, 26 bp, Homo sapiens
tgaggtctgagggctgctaggagaac

SEQ ID NO: 114261 - DNA, 26 bp, Homo sapiens
gaggtctgagggctgctaggagaaca

SEQ ID NO: 114262 - DNA, 26 bp, Homo sapiens
aggtctgagggctgctaggagaacaa

SEQ ID NO: 114263 - DNA, 26 bp, Homo sapiens
ggtctgagggctgctaggagaacaaa

SEQ ID NO: 114264 - DNA, 26 bp, Homo sapiens
gtctgagggctgctaggagaacaaac

SEQ ID NO: 114265 - DNA, 26 bp, Homo sapiens
tctgagggctgctaggagaacaaaca

SEQ ID NO: 114266 - DNA, 26 bp, Homo sapiens
ctgagggctgctaggagaacaaacac

SEQ ID NO: 114267 - DNA, 26 bp, Homo sapiens
tgagggctgctaggagaacaaacacc

SEQ ID NO: 114268 - DNA, 26 bp, Homo sapiens
gagggctgctaggagaacaaacacct

SEQ ID NO: 114269 - DNA, 26 bp, Homo sapiens
agggctgctaggagaacaaacacctt

SEQ ID NO: 114270 - DNA, 26 bp, Homo sapiens
gggctgctaggagaacaaacaccttt

SEQ ID NO: 114271 - DNA, 26 bp, Homo sapiens
ggctgctaggagaacaaacacctttt

SEQ ID NO: 114272 - DNA, 26 bp, Homo sapiens
gctgctaggagaacaaacaccttttg

SEQ ID NO: 114273 - DNA, 26 bp, Homo sapiens
ctgctaggagaacaaacaccttttgc

SEQ ID NO: 114274 - DNA, 26 bp, Homo sapiens
tgctaggagaacaaacaccttttgct

SEQ ID NO: 114275 - DNA, 26 bp, Homo sapiens
gctaggagaacaaacaccttttgctg

SEQ ID NO: 114276 - DNA, 26 bp, Homo sapiens
ctaggagaacaaacaccttttgctgg

SEQ ID NO: 114277 - DNA, 26 bp, Homo sapiens
taggagaacaaacaccttttgctgga

SEQ ID NO: 114278 - DNA, 26 bp, Homo sapiens
aggagaacaaacaccttttgctggaa

SEQ ID NO: 114279 - DNA, 26 bp, Homo sapiens
ggagaacaaacaccttttgctggaag

SEQ ID NO: 114280 - DNA, 26 bp, Homo sapiens
gagaacaaacaccttttgctggaagt

SEQ ID NO: 114281 - DNA, 26 bp, Homo sapiens
agaacaaacaccttttgctggaagta

SEQ ID NO: 114282 - DNA, 26 bp, Homo sapiens
gaacaaacaccttttgctggaagtaa

SEQ ID NO: 114283 - DNA, 26 bp, Homo sapiens
aacaaacaccttttgctggaagtaat

SEQ ID NO: 114284 - DNA, 26 bp, Homo sapiens
acaaacaccttttgctggaagtaatg

SEQ ID NO: 114285 - DNA, 26 bp, Homo sapiens
caaacaccttttgctggaagtaatgc

SEQ ID NO: 114286 - DNA, 26 bp, Homo sapiens
aaacaccttttgctggaagtaatgcg

SEQ ID NO: 114287 - DNA, 26 bp, Homo sapiens
aacaccttttgctggaagtaatgcgt

SEQ ID NO: 114288 - DNA, 26 bp, Homo sapiens
acaccttttgctggaagtaatgcgtt

SEQ ID NO: 114289 - DNA, 26 bp, Homo sapiens
caccttttgctggaagtaatgcgttg

SEQ ID NO: 114290 - DNA, 26 bp, Homo sapiens
accttttgctggaagtaatgcgttga

SEQ ID NO: 114291 - DNA, 26 bp, Homo sapiens
ccttttgctggaagtaatgcgttgag

SEQ ID NO: 114292 - DNA, 26 bp, Homo sapiens
cttttgctggaagtaatgcgttgaga

SEQ ID NO: 114293 - DNA, 26 bp, Homo sapiens
ttttgctggaagtaatgcgttgagaa

SEQ ID NO: 114294 - DNA, 26 bp, Homo sapiens
tttgctggaagtaatgcgttgagaaa

SEQ ID NO: 114295 - DNA, 26 bp, Homo sapiens
ttgctggaagtaatgcgttgagaaaa

SEQ ID NO: 114296 - DNA, 26 bp, Homo sapiens
tgctggaagtaatgcgttgagaaaat

SEQ ID NO: 114297 - DNA, 26 bp, Homo sapiens
gctggaagtaatgcgttgagaaaatg

SEQ ID NO: 114298 - DNA, 26 bp, Homo sapiens
ctggaagtaatgcgttgagaaaatgc

SEQ ID NO: 114299 - DNA, 26 bp, Homo sapiens
tggaagtaatgcgttgagaaaatgcc

SEQ ID NO: 114300 - DNA, 26 bp, Homo sapiens
ggaagtaatgcgttgagaaaatgccc

SEQ ID NO: 114301 - DNA, 26 bp, Homo sapiens
gaagtaatgcgttgagaaaatgccca

SEQ ID NO: 114302 - DNA, 26 bp, Homo sapiens
aagtaatgcgttgagaaaatgcccac

SEQ ID NO: 114303 - DNA, 26 bp, Homo sapiens
agtaatgcgttgagaaaatgcccacc

SEQ ID NO: 114304 - DNA, 26 bp, Homo sapiens
gtaatgcgttgagaaaatgcccacca

SEQ ID NO: 114305 - DNA, 26 bp, Homo sapiens
taatgcgttgagaaaatgcccaccat

SEQ ID NO: 114306 - DNA, 26 bp, Homo sapiens
aatgcgttgagaaaatgcccaccatg

SEQ ID NO: 114307 - DNA, 26 bp, Homo sapiens
atgcgttgagaaaatgcccaccatga

SEQ ID NO: 114308 - DNA, 26 bp, Homo sapiens
tgcgttgagaaaatgcccaccatgat

SEQ ID NO: 114309 - DNA, 26 bp, Homo sapiens
gcgttgagaaaatgcccaccatgatg

SEQ ID NO: 114310 - DNA, 26 bp, Homo sapiens
cgttgagaaaatgcccaccatgatga

SEQ ID NO: 114311 - DNA, 26 bp, Homo sapiens
gttgagaaaatgcccaccatgatgat

SEQ ID NO: 114312 - DNA, 26 bp, Homo sapiens
ttgagaaaatgcccaccatgatgata

SEQ ID NO: 114313 - DNA, 26 bp, Homo sapiens
tgagaaaatgcccaccatgatgatag

SEQ ID NO: 114314 - DNA, 26 bp, Homo sapiens
gagaaaatgcccaccatgatgatagc

SEQ ID NO: 114315 - DNA, 26 bp, Homo sapiens
agaaaatgcccaccatgatgatagca

SEQ ID NO: 114316 - DNA, 26 bp, Homo sapiens
gaaaatgcccaccatgatgatagcaa

SEQ ID NO: 114317 - DNA, 26 bp, Homo sapiens
aaaatgcccaccatgatgatagcaat

SEQ ID NO: 114318 - DNA, 26 bp, Homo sapiens
aaatgcccaccatgatgatagcaatg

SEQ ID NO: 114319 - DNA, 26 bp, Homo sapiens
aatgcccaccatgatgatagcaatgc

SEQ ID NO: 114320 - DNA, 26 bp, Homo sapiens
atgcccaccatgatgatagcaatgca

SEQ ID NO: 114321 - DNA, 26 bp, Homo sapiens
tgcccaccatgatgatagcaatgcaa

SEQ ID NO: 114322 - DNA, 26 bp, Homo sapiens
gcccaccatgatgatagcaatgcaaa

SEQ ID NO: 114323 - DNA, 26 bp, Homo sapiens
cccaccatgatgatagcaatgcaaat

SEQ ID NO: 114324 - DNA, 26 bp, Homo sapiens
ccaccatgatgatagcaatgcaaatg

SEQ ID NO: 114325 - DNA, 26 bp, Homo sapiens
caccatgatgatagcaatgcaaatgc

SEQ ID NO: 114326 - DNA, 26 bp, Homo sapiens
accatgatgatagcaatgcaaatgct

SEQ ID NO: 114327 - DNA, 26 bp, Homo sapiens
ccatgatgatagcaatgcaaatgctt

SEQ ID NO: 114328 - DNA, 26 bp, Homo sapiens
catgatgatagcaatgcaaatgcttg

SEQ ID NO: 114329 - DNA, 26 bp, Homo sapiens
atgatgatagcaatgcaaatgcttgg

SEQ ID NO: 114330 - DNA, 26 bp, Homo sapiens
tgatgatagcaatgcaaatgcttggt

SEQ ID NO: 114331 - DNA, 26 bp, Homo sapiens
gatgatagcaatgcaaatgcttggtg

SEQ ID NO: 114332 - DNA, 26 bp, Homo sapiens
atgatagcaatgcaaatgcttggtgc

SEQ ID NO: 114333 - DNA, 26 bp, Homo sapiens
tgatagcaatgcaaatgcttggtgcc

SEQ ID NO: 114334 - DNA, 26 bp, Homo sapiens
gatagcaatgcaaatgcttggtgcca

SEQ ID NO: 114335 - DNA, 26 bp, Homo sapiens
atagcaatgcaaatgcttggtgccac

SEQ ID NO: 114336 - DNA, 26 bp, Homo sapiens
tagcaatgcaaatgcttggtgccaca

SEQ ID NO: 114337 - DNA, 26 bp, Homo sapiens
agcaatgcaaatgcttggtgccacaa

SEQ ID NO: 114338 - DNA, 26 bp, Homo sapiens
gcaatgcaaatgcttggtgccacaaa

SEQ ID NO: 114339 - DNA, 26 bp, Homo sapiens
caatgcaaatgcttggtgccacaaac

SEQ ID NO: 114340 - DNA, 26 bp, Homo sapiens
aatgcaaatgcttggtgccacaaacg

SEQ ID NO: 114341 - DNA, 26 bp, Homo sapiens
atgcaaatgcttggtgccacaaacgc

SEQ ID NO: 114342 - DNA, 26 bp, Homo sapiens
tgcaaatgcttggtgccacaaacgcc

SEQ ID NO: 114343 - DNA, 26 bp, Homo sapiens
gcaaatgcttggtgccacaaacgcca

SEQ ID NO: 114344 - DNA, 26 bp, Homo sapiens
caaatgcttggtgccacaaacgccat

SEQ ID NO: 114345 - DNA, 26 bp, Homo sapiens
aaatgcttggtgccacaaacgccatc

SEQ ID NO: 114346 - DNA, 26 bp, Homo sapiens
aatgcttggtgccacaaacgccatcc

SEQ ID NO: 114347 - DNA, 26 bp, Homo sapiens
atgcttggtgccacaaacgccatcca

SEQ ID NO: 114348 - DNA, 26 bp, Homo sapiens
tgcttggtgccacaaacgccatccaa

SEQ ID NO: 114349 - DNA, 26 bp, Homo sapiens
gcttggtgccacaaacgccatccaat

SEQ ID NO: 114350 - DNA, 26 bp, Homo sapiens
cttggtgccacaaacgccatccaatt

SEQ ID NO: 114351 - DNA, 26 bp, Homo sapiens
ttggtgccacaaacgccatccaattg

SEQ ID NO: 114352 - DNA, 26 bp, Homo sapiens
tggtgccacaaacgccatccaattgg

SEQ ID NO: 114353 - DNA, 26 bp, Homo sapiens
ggtgccacaaacgccatccaattggc

SEQ ID NO: 114354 - DNA, 26 bp, Homo sapiens
gtgccacaaacgccatccaattggct

SEQ ID NO: 114355 - DNA, 26 bp, Homo sapiens
tgccacaaacgccatccaattggctt

SEQ ID NO: 114356 - DNA, 26 bp, Homo sapiens
gccacaaacgccatccaattggcttt

SEQ ID NO: 114357 - DNA, 26 bp, Homo sapiens
ccacaaacgccatccaattggcttta

SEQ ID NO: 114358 - DNA, 26 bp, Homo sapiens
cacaaacgccatccaattggctttac

SEQ ID NO: 114359 - DNA, 26 bp, Homo sapiens
acaaacgccatccaattggctttacc

SEQ ID NO: 114360 - DNA, 26 bp, Homo sapiens
caaacgccatccaattggctttacct

SEQ ID NO: 114361 - DNA, 26 bp, Homo sapiens
aaacgccatccaattggctttacctt

SEQ ID NO: 114362 - DNA, 26 bp, Homo sapiens
aacgccatccaattggctttaccttg

SEQ ID NO: 114363 - DNA, 26 bp, Homo sapiens
acgccatccaattggctttaccttgc

SEQ ID NO: 114364 - DNA, 26 bp, Homo sapiens
cgccatccaattggctttaccttgca

SEQ ID NO: 114365 - DNA, 26 bp, Homo sapiens
gccatccaattggctttaccttgcag

SEQ ID NO: 114366 - DNA, 26 bp, Homo sapiens
ccatccaattggctttaccttgcaga

SEQ ID NO: 114367 - DNA, 26 bp, Homo sapiens
catccaattggctttaccttgcagac

SEQ ID NO: 114368 - DNA, 26 bp, Homo sapiens
atccaattggctttaccttgcagaca

SEQ ID NO: 114369 - DNA, 26 bp, Homo sapiens
tccaattggctttaccttgcagacaa

SEQ ID NO: 114370 - DNA, 26 bp, Homo sapiens
ccaattggctttaccttgcagacaaa

SEQ ID NO: 114371 - DNA, 26 bp, Homo sapiens
caattggctttaccttgcagacaaaa

SEQ ID NO: 114372 - DNA, 26 bp, Homo sapiens
aattggctttaccttgcagacaaaat

SEQ ID NO: 114373 - DNA, 26 bp, Homo sapiens
attggctttaccttgcagacaaaatt

SEQ ID NO: 114374 - DNA, 26 bp, Homo sapiens
ttggctttaccttgcagacaaaattc

SEQ ID NO: 114375 - DNA, 26 bp, Homo sapiens
tggctttaccttgcagacaaaattcc

SEQ ID NO: 114376 - DNA, 26 bp, Homo sapiens
ggctttaccttgcagacaaaattccc

SEQ ID NO: 114377 - DNA, 26 bp, Homo sapiens
gctttaccttgcagacaaaattccct

SEQ ID NO: 114378 - DNA, 26 bp, Homo sapiens
ctttaccttgcagacaaaattccctc

SEQ ID NO: 114379 - DNA, 26 bp, Homo sapiens
tttaccttgcagacaaaattccctct

SEQ ID NO: 114380 - DNA, 26 bp, Homo sapiens
ttaccttgcagacaaaattccctctc

SEQ ID NO: 114381 - DNA, 26 bp, Homo sapiens
taccttgcagacaaaattccctctca

SEQ ID NO: 114382 - DNA, 26 bp, Homo sapiens
accttgcagacaaaattccctctcat

SEQ ID NO: 114383 - DNA, 26 bp, Homo sapiens
ccttgcagacaaaattccctctcatt

SEQ ID NO: 114384 - DNA, 26 bp, Homo sapiens
cttgcagacaaaattccctctcattt

SEQ ID NO: 114385 - DNA, 26 bp, Homo sapiens
ttgcagacaaaattccctctcatttc

SEQ ID NO: 114386 - DNA, 26 bp, Homo sapiens
tgcagacaaaattccctctcatttcc

SEQ ID NO: 114387 - DNA, 26 bp, Homo sapiens
gcagacaaaattccctctcatttccg

SEQ ID NO: 114388 - DNA, 26 bp, Homo sapiens
cagacaaaattccctctcatttccgt

SEQ ID NO: 114389 - DNA, 26 bp, Homo sapiens
agacaaaattccctctcatttccgtg

SEQ ID NO: 114390 - DNA, 26 bp, Homo sapiens
gacaaaattccctctcatttccgtgg

SEQ ID NO: 114391 - DNA, 26 bp, Homo sapiens
acaaaattccctctcatttccgtggg

SEQ ID NO: 114392 - DNA, 26 bp, Homo sapiens
caaaattccctctcatttccgtggga

SEQ ID NO: 114393 - DNA, 26 bp, Homo sapiens
aaaattccctctcatttccgtgggaa

SEQ ID NO: 114394 - DNA, 26 bp, Homo sapiens
aaattccctctcatttccgtgggaac

SEQ ID NO: 114395 - DNA, 26 bp, Homo sapiens
aattccctctcatttccgtgggaact

SEQ ID NO: 114396 - DNA, 26 bp, Homo sapiens
attccctctcatttccgtgggaactt

SEQ ID NO: 114397 - DNA, 26 bp, Homo sapiens
ttccctctcatttccgtgggaacttt

SEQ ID NO: 114398 - DNA, 26 bp, Homo sapiens
tccctctcatttccgtgggaactttc

SEQ ID NO: 114399 - DNA, 26 bp, Homo sapiens
ccctctcatttccgtgggaactttca

SEQ ID NO: 114400 - DNA, 26 bp, Homo sapiens
cctctcatttccgtgggaactttcac

SEQ ID NO: 114401 - DNA, 26 bp, Homo sapiens
ctctcatttccgtgggaactttcacc

SEQ ID NO: 114402 - DNA, 26 bp, Homo sapiens
tctcatttccgtgggaactttcacca

SEQ ID NO: 114403 - DNA, 26 bp, Homo sapiens
ctcatttccgtgggaactttcaccag

SEQ ID NO: 114404 - DNA, 26 bp, Homo sapiens
tcatttccgtgggaactttcaccagc

SEQ ID NO: 114405 - DNA, 26 bp, Homo sapiens
catttccgtgggaactttcaccagca

SEQ ID NO: 114406 - DNA, 26 bp, Homo sapiens
atttccgtgggaactttcaccagcag

SEQ ID NO: 114407 - DNA, 26 bp, Homo sapiens
tttccgtgggaactttcaccagcagc

SEQ ID NO: 114408 - DNA, 26 bp, Homo sapiens
ttccgtgggaactttcaccagcagct

SEQ ID NO: 114409 - DNA, 26 bp, Homo sapiens
tccgtgggaactttcaccagcagctg

SEQ ID NO: 114410 - DNA, 26 bp, Homo sapiens
ccgtgggaactttcaccagcagctgt

SEQ ID NO: 114411 - DNA, 26 bp, Homo sapiens
cgtgggaactttcaccagcagctgtc

SEQ ID NO: 114412 - DNA, 26 bp, Homo sapiens
gtgggaactttcaccagcagctgtca

SEQ ID NO: 114413 - DNA, 26 bp, Homo sapiens
tgggaactttcaccagcagctgtcag

SEQ ID NO: 114414 - DNA, 26 bp, Homo sapiens
gggaactttcaccagcagctgtcaga

SEQ ID NO: 114415 - DNA, 26 bp, Homo sapiens
ggaactttcaccagcagctgtcagag

SEQ ID NO: 114416 - DNA, 26 bp, Homo sapiens
gaactttcaccagcagctgtcagagc

SEQ ID NO: 114417 - DNA, 26 bp, Homo sapiens
aactttcaccagcagctgtcagagct

SEQ ID NO: 114418 - DNA, 26 bp, Homo sapiens
actttcaccagcagctgtcagagctg

SEQ ID NO: 114419 - DNA, 26 bp, Homo sapiens
ctttcaccagcagctgtcagagctgt

SEQ ID NO: 114420 - DNA, 26 bp, Homo sapiens
tttcaccagcagctgtcagagctgtc

SEQ ID NO: 114421 - DNA, 26 bp, Homo sapiens
ttcaccagcagctgtcagagctgtca

SEQ ID NO: 114422 - DNA, 26 bp, Homo sapiens
tcaccagcagctgtcagagctgtcat

SEQ ID NO: 114423 - DNA, 26 bp, Homo sapiens
caccagcagctgtcagagctgtcatc

SEQ ID NO: 114424 - DNA, 26 bp, Homo sapiens
accagcagctgtcagagctgtcatcc

SEQ ID NO: 114425 - DNA, 26 bp, Homo sapiens
ccagcagctgtcagagctgtcatcca

SEQ ID NO: 114426 - DNA, 26 bp, Homo sapiens
cagcagctgtcagagctgtcatccac

SEQ ID NO: 114427 - DNA, 26 bp, Homo sapiens
agcagctgtcagagctgtcatccaca

SEQ ID NO: 114428 - DNA, 26 bp, Homo sapiens
gcagctgtcagagctgtcatccacag

SEQ ID NO: 114429 - DNA, 26 bp, Homo sapiens
cagctgtcagagctgtcatccacagg

SEQ ID NO: 114430 - DNA, 26 bp, Homo sapiens
agctgtcagagctgtcatccacagga

SEQ ID NO: 114431 - DNA, 26 bp, Homo sapiens
gctgtcagagctgtcatccacaggac

SEQ ID NO: 114432 - DNA, 26 bp, Homo sapiens
ctgtcagagctgtcatccacaggaca

SEQ ID NO: 114433 - DNA, 26 bp, Homo sapiens
tgtcagagctgtcatccacaggacat

SEQ ID NO: 114434 - DNA, 26 bp, Homo sapiens
gtcagagctgtcatccacaggacata

SEQ ID NO: 114435 - DNA, 26 bp, Homo sapiens
tcagagctgtcatccacaggacatat

SEQ ID NO: 114436 - DNA, 26 bp, Homo sapiens
cagagctgtcatccacaggacatatg

SEQ ID NO: 114437 - DNA, 26 bp, Homo sapiens
agagctgtcatccacaggacatatgt

SEQ ID NO: 114438 - DNA, 26 bp, Homo sapiens
gagctgtcatccacaggacatatgtc

SEQ ID NO: 114439 - DNA, 26 bp, Homo sapiens
agctgtcatccacaggacatatgtca

SEQ ID NO: 114440 - DNA, 26 bp, Homo sapiens
gctgtcatccacaggacatatgtcac

SEQ ID NO: 114441 - DNA, 26 bp, Homo sapiens
ctgtcatccacaggacatatgtcact

SEQ ID NO: 114442 - DNA, 26 bp, Homo sapiens
tgtcatccacaggacatatgtcactc

SEQ ID NO: 114443 - DNA, 26 bp, Homo sapiens
gtcatccacaggacatatgtcactcg

SEQ ID NO: 114444 - DNA, 26 bp, Homo sapiens
tcatccacaggacatatgtcactcgg

SEQ ID NO: 114445 - DNA, 26 bp, Homo sapiens
catccacaggacatatgtcactcggg

SEQ ID NO: 114446 - DNA, 26 bp, Homo sapiens
atccacaggacatatgtcactcgggg

SEQ ID NO: 114447 - DNA, 26 bp, Homo sapiens
tccacaggacatatgtcactcggggc

SEQ ID NO: 114448 - DNA, 26 bp, Homo sapiens
ccacaggacatatgtcactcggggct

SEQ ID NO: 114449 - DNA, 26 bp, Homo sapiens
cacaggacatatgtcactcggggctg

SEQ ID NO: 114450 - DNA, 26 bp, Homo sapiens
acaggacatatgtcactcggggctgc

SEQ ID NO: 114451 - DNA, 26 bp, Homo sapiens
caggacatatgtcactcggggctgca

SEQ ID NO: 114452 - DNA, 26 bp, Homo sapiens
aggacatatgtcactcggggctgcag

SEQ ID NO: 114453 - DNA, 26 bp, Homo sapiens
ggacatatgtcactcggggctgcagg

SEQ ID NO: 114454 - DNA, 26 bp, Homo sapiens
gacatatgtcactcggggctgcaggc

SEQ ID NO: 114455 - DNA, 26 bp, Homo sapiens
acatatgtcactcggggctgcaggct

SEQ ID NO: 114456 - DNA, 26 bp, Homo sapiens
catatgtcactcggggctgcaggctg

SEQ ID NO: 114457 - DNA, 26 bp, Homo sapiens
atatgtcactcggggctgcaggctgt

SEQ ID NO: 114458 - DNA, 26 bp, Homo sapiens
tatgtcactcggggctgcaggctgtt

SEQ ID NO: 114459 - DNA, 26 bp, Homo sapiens
atgtcactcggggctgcaggctgttt

SEQ ID NO: 114460 - DNA, 26 bp, Homo sapiens
tgtcactcggggctgcaggctgttta

SEQ ID NO: 114461 - DNA, 26 bp, Homo sapiens
gtcactcggggctgcaggctgtttat

SEQ ID NO: 114462 - DNA, 26 bp, Homo sapiens
tcactcggggctgcaggctgtttatt

SEQ ID NO: 114463 - DNA, 26 bp, Homo sapiens
cactcggggctgcaggctgtttattg

SEQ ID NO: 114464 - DNA, 26 bp, Homo sapiens
actcggggctgcaggctgtttattgg

SEQ ID NO: 114465 - DNA, 26 bp, Homo sapiens
ctcggggctgcaggctgtttattgga

SEQ ID NO: 114466 - DNA, 26 bp, Homo sapiens
tcggggctgcaggctgtttattggat

SEQ ID NO: 114467 - DNA, 26 bp, Homo sapiens
cggggctgcaggctgtttattggatg

SEQ ID NO: 114468 - DNA, 26 bp, Homo sapiens
ggggctgcaggctgtttattggatgt

SEQ ID NO: 114469 - DNA, 26 bp, Homo sapiens
gggctgcaggctgtttattggatgtg

SEQ ID NO: 114470 - DNA, 26 bp, Homo sapiens
ggctgcaggctgtttattggatgtga

SEQ ID NO: 114471 - DNA, 26 bp, Homo sapiens
gctgcaggctgtttattggatgtgaa

SEQ ID NO: 114472 - DNA, 26 bp, Homo sapiens
ctgcaggctgtttattggatgtgaat

SEQ ID NO: 114473 - DNA, 26 bp, Homo sapiens
tgcaggctgtttattggatgtgaatt

SEQ ID NO: 114474 - DNA, 26 bp, Homo sapiens
gcaggctgtttattggatgtgaattt

SEQ ID NO: 114475 - DNA, 26 bp, Homo sapiens
caggctgtttattggatgtgaatttt

SEQ ID NO: 114476 - DNA, 26 bp, Homo sapiens
aggctgtttattggatgtgaattttg

SEQ ID NO: 114477 - DNA, 26 bp, Homo sapiens
ggctgtttattggatgtgaattttgg

SEQ ID NO: 114478 - DNA, 26 bp, Homo sapiens
gctgtttattggatgtgaattttggg

SEQ ID NO: 114479 - DNA, 26 bp, Homo sapiens
ctgtttattggatgtgaattttggga

SEQ ID NO: 114480 - DNA, 26 bp, Homo sapiens
tgtttattggatgtgaattttgggag

SEQ ID NO: 114481 - DNA, 26 bp, Homo sapiens
gtttattggatgtgaattttgggaga

SEQ ID NO: 114482 - DNA, 26 bp, Homo sapiens
tttattggatgtgaattttgggagac

SEQ ID NO: 114483 - DNA, 26 bp, Homo sapiens
ttattggatgtgaattttgggagact

SEQ ID NO: 114484 - DNA, 26 bp, Homo sapiens
tattggatgtgaattttgggagactc

SEQ ID NO: 114485 - DNA, 26 bp, Homo sapiens
attggatgtgaattttgggagactct

SEQ ID NO: 114486 - DNA, 26 bp, Homo sapiens
ttggatgtgaattttgggagactctg

SEQ ID NO: 114487 - DNA, 26 bp, Homo sapiens
tggatgtgaattttgggagactctgt

SEQ ID NO: 114488 - DNA, 26 bp, Homo sapiens
ggatgtgaattttgggagactctgta

SEQ ID NO: 114489 - DNA, 26 bp, Homo sapiens
gatgtgaattttgggagactctgtag

SEQ ID NO: 114490 - DNA, 26 bp, Homo sapiens
atgtgaattttgggagactctgtagg

SEQ ID NO: 114491 - DNA, 26 bp, Homo sapiens
tgtgaattttgggagactctgtaggg

SEQ ID NO: 114492 - DNA, 26 bp, Homo sapiens
gtgaattttgggagactctgtaggga

SEQ ID NO: 114493 - DNA, 26 bp, Homo sapiens
tgaattttgggagactctgtagggaa

SEQ ID NO: 114494 - DNA, 26 bp, Homo sapiens
gaattttgggagactctgtagggaat

SEQ ID NO: 114495 - DNA, 26 bp, Homo sapiens
aattttgggagactctgtagggaatt

SEQ ID NO: 114496 - DNA, 26 bp, Homo sapiens
attttgggagactctgtagggaattt

SEQ ID NO: 114497 - DNA, 26 bp, Homo sapiens
ttttgggagactctgtagggaatttc

SEQ ID NO: 114498 - DNA, 26 bp, Homo sapiens
tttgggagactctgtagggaatttca

SEQ ID NO: 114499 - DNA, 26 bp, Homo sapiens
ttgggagactctgtagggaatttcac

SEQ ID NO: 114500 - DNA, 26 bp, Homo sapiens
tgggagactctgtagggaatttcaca

SEQ ID NO: 114501 - DNA, 26 bp, Homo sapiens
gggagactctgtagggaatttcacag

SEQ ID NO: 114502 - DNA, 26 bp, Homo sapiens
ggagactctgtagggaatttcacaga

SEQ ID NO: 114503 - DNA, 26 bp, Homo sapiens
gagactctgtagggaatttcacagag

SEQ ID NO: 114504 - DNA, 26 bp, Homo sapiens
agactctgtagggaatttcacagagc

SEQ ID NO: 114505 - DNA, 26 bp, Homo sapiens
gactctgtagggaatttcacagagct

SEQ ID NO: 114506 - DNA, 26 bp, Homo sapiens
actctgtagggaatttcacagagctg

SEQ ID NO: 114507 - DNA, 26 bp, Homo sapiens
ctctgtagggaatttcacagagctga

SEQ ID NO: 114508 - DNA, 26 bp, Homo sapiens
tctgtagggaatttcacagagctgag

SEQ ID NO: 114509 - DNA, 26 bp, Homo sapiens
ctgtagggaatttcacagagctgagg

SEQ ID NO: 114510 - DNA, 26 bp, Homo sapiens
tgtagggaatttcacagagctgaggc

SEQ ID NO: 114511 - DNA, 26 bp, Homo sapiens
gtagggaatttcacagagctgaggct

SEQ ID NO: 114512 - DNA, 26 bp, Homo sapiens
tagggaatttcacagagctgaggctg

SEQ ID NO: 114513 - DNA, 26 bp, Homo sapiens
agggaatttcacagagctgaggctgg

SEQ ID NO: 114514 - DNA, 26 bp, Homo sapiens
gggaatttcacagagctgaggctggg

SEQ ID NO: 114515 - DNA, 26 bp, Homo sapiens
ggaatttcacagagctgaggctggga

SEQ ID NO: 114516 - DNA, 26 bp, Homo sapiens
gaatttcacagagctgaggctgggag

SEQ ID NO: 114517 - DNA, 26 bp, Homo sapiens
aatttcacagagctgaggctgggagt

SEQ ID NO: 114518 - DNA, 26 bp, Homo sapiens
atttcacagagctgaggctgggagtt

SEQ ID NO: 114519 - DNA, 26 bp, Homo sapiens
tttcacagagctgaggctgggagttg

SEQ ID NO: 114520 - DNA, 26 bp, Homo sapiens
ttcacagagctgaggctgggagttgg

SEQ ID NO: 114521 - DNA, 26 bp, Homo sapiens
tcacagagctgaggctgggagttgga

SEQ ID NO: 114522 - DNA, 26 bp, Homo sapiens
cacagagctgaggctgggagttggag

SEQ ID NO: 114523 - DNA, 26 bp, Homo sapiens
acagagctgaggctgggagttggagt

SEQ ID NO: 114524 - DNA, 26 bp, Homo sapiens
cagagctgaggctgggagttggagtc

SEQ ID NO: 114525 - DNA, 26 bp, Homo sapiens
agagctgaggctgggagttggagtcc

SEQ ID NO: 114526 - DNA, 26 bp, Homo sapiens
gagctgaggctgggagttggagtccc

SEQ ID NO: 114527 - DNA, 26 bp, Homo sapiens
agctgaggctgggagttggagtcccg

SEQ ID NO: 114528 - DNA, 26 bp, Homo sapiens
gctgaggctgggagttggagtcccgt

SEQ ID NO: 114529 - DNA, 26 bp, Homo sapiens
ctgaggctgggagttggagtcccgtt

SEQ ID NO: 114530 - DNA, 26 bp, Homo sapiens
tgaggctgggagttggagtcccgttc

SEQ ID NO: 114531 - DNA, 26 bp, Homo sapiens
gaggctgggagttggagtcccgttcc

SEQ ID NO: 114532 - DNA, 26 bp, Homo sapiens
aggctgggagttggagtcccgttcct

SEQ ID NO: 114533 - DNA, 26 bp, Homo sapiens
ggctgggagttggagtcccgttcctt

SEQ ID NO: 114534 - DNA, 26 bp, Homo sapiens
gctgggagttggagtcccgttccttc

SEQ ID NO: 114535 - DNA, 26 bp, Homo sapiens
ctgggagttggagtcccgttccttcc

SEQ ID NO: 114536 - DNA, 26 bp, Homo sapiens
tgggagttggagtcccgttccttcca

SEQ ID NO: 114537 - DNA, 26 bp, Homo sapiens
gggagttggagtcccgttccttccag

SEQ ID NO: 114538 - DNA, 26 bp, Homo sapiens
ggagttggagtcccgttccttccagt

SEQ ID NO: 114539 - DNA, 26 bp, Homo sapiens
gagttggagtcccgttccttccagta

SEQ ID NO: 114540 - DNA, 26 bp, Homo sapiens
agttggagtcccgttccttccagtat

SEQ ID NO: 114541 - DNA, 26 bp, Homo sapiens
gttggagtcccgttccttccagtata

SEQ ID NO: 114542 - DNA, 26 bp, Homo sapiens
ttggagtcccgttccttccagtatat

SEQ ID NO: 114543 - DNA, 26 bp, Homo sapiens
tggagtcccgttccttccagtatatc

SEQ ID NO: 114544 - DNA, 26 bp, Homo sapiens
ggagtcccgttccttccagtatatcc

SEQ ID NO: 114545 - DNA, 26 bp, Homo sapiens
gagtcccgttccttccagtatatcct

SEQ ID NO: 114546 - DNA, 26 bp, Homo sapiens
agtcccgttccttccagtatatccta

SEQ ID NO: 114547 - DNA, 26 bp, Homo sapiens
gtcccgttccttccagtatatcctat

SEQ ID NO: 114548 - DNA, 26 bp, Homo sapiens
tcccgttccttccagtatatcctata

SEQ ID NO: 114549 - DNA, 26 bp, Homo sapiens
cccgttccttccagtatatcctataa

SEQ ID NO: 114550 - DNA, 26 bp, Homo sapiens
ccgttccttccagtatatcctataat

SEQ ID NO: 114551 - DNA, 26 bp, Homo sapiens
cgttccttccagtatatcctataatg

SEQ ID NO: 114552 - DNA, 26 bp, Homo sapiens
gttccttccagtatatcctataatgg

SEQ ID NO: 114553 - DNA, 26 bp, Homo sapiens
ttccttccagtatatcctataatgga

SEQ ID NO: 114554 - DNA, 26 bp, Homo sapiens
tccttccagtatatcctataatggag

SEQ ID NO: 114555 - DNA, 26 bp, Homo sapiens
ccttccagtatatcctataatggagg

SEQ ID NO: 114556 - DNA, 26 bp, Homo sapiens
cttccagtatatcctataatggagga

SEQ ID NO: 114557 - DNA, 26 bp, Homo sapiens
ttccagtatatcctataatggaggag

SEQ ID NO: 114558 - DNA, 26 bp, Homo sapiens
tccagtatatcctataatggaggagg

SEQ ID NO: 114559 - DNA, 26 bp, Homo sapiens
ccagtatatcctataatggaggaggc

SEQ ID NO: 114560 - DNA, 26 bp, Homo sapiens
cagtatatcctataatggaggaggca

SEQ ID NO: 114561 - DNA, 26 bp, Homo sapiens
agtatatcctataatggaggaggcag

SEQ ID NO: 114562 - DNA, 26 bp, Homo sapiens
gtatatcctataatggaggaggcagc

SEQ ID NO: 114563 - DNA, 26 bp, Homo sapiens
tatatcctataatggaggaggcagcc

SEQ ID NO: 114564 - DNA, 26 bp, Homo sapiens
atatcctataatggaggaggcagccc

SEQ ID NO: 114565 - DNA, 26 bp, Homo sapiens
tatcctataatggaggaggcagccca

SEQ ID NO: 114566 - DNA, 26 bp, Homo sapiens
atcctataatggaggaggcagcccat

SEQ ID NO: 114567 - DNA, 26 bp, Homo sapiens
tcctataatggaggaggcagcccatt

SEQ ID NO: 114568 - DNA, 26 bp, Homo sapiens
cctataatggaggaggcagcccattt

SEQ ID NO: 114569 - DNA, 26 bp, Homo sapiens
ctataatggaggaggcagcccatttg

SEQ ID NO: 114570 - DNA, 26 bp, Homo sapiens
tataatggaggaggcagcccatttgc

SEQ ID NO: 114571 - DNA, 26 bp, Homo sapiens
ataatggaggaggcagcccatttgct

SEQ ID NO: 114572 - DNA, 26 bp, Homo sapiens
taatggaggaggcagcccatttgctc

SEQ ID NO: 114573 - DNA, 26 bp, Homo sapiens
aatggaggaggcagcccatttgctcc

SEQ ID NO: 114574 - DNA, 26 bp, Homo sapiens
atggaggaggcagcccatttgctcct

SEQ ID NO: 114575 - DNA, 26 bp, Homo sapiens
tggaggaggcagcccatttgctcctg

SEQ ID NO: 114576 - DNA, 26 bp, Homo sapiens
ggaggaggcagcccatttgctcctgg

SEQ ID NO: 114577 - DNA, 26 bp, Homo sapiens
gaggaggcagcccatttgctcctgga

SEQ ID NO: 114578 - DNA, 26 bp, Homo sapiens
aggaggcagcccatttgctcctggac

SEQ ID NO: 114579 - DNA, 26 bp, Homo sapiens
ggaggcagcccatttgctcctggact

SEQ ID NO: 114580 - DNA, 26 bp, Homo sapiens
gaggcagcccatttgctcctggactg

SEQ ID NO: 114581 - DNA, 26 bp, Homo sapiens
aggcagcccatttgctcctggactgg

SEQ ID NO: 114582 - DNA, 26 bp, Homo sapiens
ggcagcccatttgctcctggactgga

SEQ ID NO: 114583 - DNA, 26 bp, Homo sapiens
gcagcccatttgctcctggactggaa

SEQ ID NO: 114584 - DNA, 26 bp, Homo sapiens
cagcccatttgctcctggactggaat

SEQ ID NO: 114585 - DNA, 26 bp, Homo sapiens
agcccatttgctcctggactggaatg

SEQ ID NO: 114586 - DNA, 26 bp, Homo sapiens
gcccatttgctcctggactggaatgc

SEQ ID NO: 114587 - DNA, 26 bp, Homo sapiens
cccatttgctcctggactggaatgct

SEQ ID NO: 114588 - DNA, 26 bp, Homo sapiens
ccatttgctcctggactggaatgctg

SEQ ID NO: 114589 - DNA, 26 bp, Homo sapiens
catttgctcctggactggaatgctgt

SEQ ID NO: 114590 - DNA, 26 bp, Homo sapiens
atttgctcctggactggaatgctgtt

SEQ ID NO: 114591 - DNA, 26 bp, Homo sapiens
tttgctcctggactggaatgctgttc

SEQ ID NO: 114592 - DNA, 26 bp, Homo sapiens
ttgctcctggactggaatgctgttcc

SEQ ID NO: 114593 - DNA, 26 bp, Homo sapiens
tgctcctggactggaatgctgttcca

SEQ ID NO: 114594 - DNA, 26 bp, Homo sapiens
gctcctggactggaatgctgttccat

SEQ ID NO: 114595 - DNA, 26 bp, Homo sapiens
ctcctggactggaatgctgttccatg

SEQ ID NO: 114596 - DNA, 26 bp, Homo sapiens
tcctggactggaatgctgttccatga

SEQ ID NO: 114597 - DNA, 26 bp, Homo sapiens
cctggactggaatgctgttccatgaa

SEQ ID NO: 114598 - DNA, 26 bp, Homo sapiens
ctggactggaatgctgttccatgaaa

SEQ ID NO: 114599 - DNA, 26 bp, Homo sapiens
tggactggaatgctgttccatgaaat

SEQ ID NO: 114600 - DNA, 26 bp, Homo sapiens
ggactggaatgctgttccatgaaatt

SEQ ID NO: 114601 - DNA, 26 bp, Homo sapiens
gactggaatgctgttccatgaaatta

SEQ ID NO: 114602 - DNA, 26 bp, Homo sapiens
actggaatgctgttccatgaaattaa

SEQ ID NO: 114603 - DNA, 26 bp, Homo sapiens
ctggaatgctgttccatgaaattaaa

SEQ ID NO: 114604 - DNA, 26 bp, Homo sapiens
tggaatgctgttccatgaaattaaaa

SEQ ID NO: 114605 - DNA, 26 bp, Homo sapiens
ggaatgctgttccatgaaattaaaat

SEQ ID NO: 114606 - DNA, 26 bp, Homo sapiens
gaatgctgttccatgaaattaaaatg

SEQ ID NO: 114607 - DNA, 26 bp, Homo sapiens
aatgctgttccatgaaattaaaatgc

SEQ ID NO: 114608 - DNA, 26 bp, Homo sapiens
atgctgttccatgaaattaaaatgct

SEQ ID NO: 114609 - DNA, 26 bp, Homo sapiens
tgctgttccatgaaattaaaatgctc

SEQ ID NO: 114610 - DNA, 26 bp, Homo sapiens
gctgttccatgaaattaaaatgctcc

SEQ ID NO: 114611 - DNA, 26 bp, Homo sapiens
ctgttccatgaaattaaaatgctccc

SEQ ID NO: 114612 - DNA, 26 bp, Homo sapiens
tgttccatgaaattaaaatgctcccc

SEQ ID NO: 114613 - DNA, 26 bp, Homo sapiens
gttccatgaaattaaaatgctcccct

SEQ ID NO: 114614 - DNA, 26 bp, Homo sapiens
ttccatgaaattaaaatgctcccctt

SEQ ID NO: 114615 - DNA, 26 bp, Homo sapiens
tccatgaaattaaaatgctccccttt

SEQ ID NO: 114616 - DNA, 26 bp, Homo sapiens
ccatgaaattaaaatgctcccctttt

SEQ ID NO: 114617 - DNA, 26 bp, Homo sapiens
catgaaattaaaatgctccccttttc

SEQ ID NO: 114618 - DNA, 26 bp, Homo sapiens
atgaaattaaaatgctccccttttcc

SEQ ID NO: 114619 - DNA, 26 bp, Homo sapiens
tgaaattaaaatgctccccttttcct

SEQ ID NO: 114620 - DNA, 26 bp, Homo sapiens
gaaattaaaatgctccccttttcctc

SEQ ID NO: 114621 - DNA, 26 bp, Homo sapiens
aaattaaaatgctccccttttcctct

SEQ ID NO: 114622 - DNA, 26 bp, Homo sapiens
aattaaaatgctccccttttcctctg

SEQ ID NO: 114623 - DNA, 26 bp, Homo sapiens
attaaaatgctccccttttcctctgt

SEQ ID NO: 114624 - DNA, 26 bp, Homo sapiens
ttaaaatgctccccttttcctctgtg

SEQ ID NO: 114625 - DNA, 26 bp, Homo sapiens
taaaatgctccccttttcctctgtga

SEQ ID NO: 114626 - DNA, 26 bp, Homo sapiens
aaaatgctccccttttcctctgtgat

SEQ ID NO: 114627 - DNA, 26 bp, Homo sapiens
aaatgctccccttttcctctgtgatg

SEQ ID NO: 114628 - DNA, 26 bp, Homo sapiens
aatgctccccttttcctctgtgatgg

SEQ ID NO: 114629 - DNA, 26 bp, Homo sapiens
atgctccccttttcctctgtgatggc

SEQ ID NO: 114630 - DNA, 26 bp, Homo sapiens
tgctccccttttcctctgtgatggca

SEQ ID NO: 114631 - DNA, 26 bp, Homo sapiens
gctccccttttcctctgtgatggcat

SEQ ID NO: 114632 - DNA, 26 bp, Homo sapiens
ctccccttttcctctgtgatggcatt

SEQ ID NO: 114633 - DNA, 26 bp, Homo sapiens
tccccttttcctctgtgatggcatta

SEQ ID NO: 114634 - DNA, 26 bp, Homo sapiens
ccccttttcctctgtgatggcattaa

SEQ ID NO: 114635 - DNA, 26 bp, Homo sapiens
cccttttcctctgtgatggcattaat

SEQ ID NO: 114636 - DNA, 26 bp, Homo sapiens
ccttttcctctgtgatggcattaatg

SEQ ID NO: 114637 - DNA, 26 bp, Homo sapiens
cttttcctctgtgatggcattaatgt

SEQ ID NO: 114638 - DNA, 26 bp, Homo sapiens
ttttcctctgtgatggcattaatgtg

SEQ ID NO: 114639 - DNA, 26 bp, Homo sapiens
tttcctctgtgatggcattaatgtgg

SEQ ID NO: 114640 - DNA, 26 bp, Homo sapiens
ttcctctgtgatggcattaatgtggg

SEQ ID NO: 114641 - DNA, 26 bp, Homo sapiens
tcctctgtgatggcattaatgtgggg

SEQ ID NO: 114642 - DNA, 26 bp, Homo sapiens
cctctgtgatggcattaatgtggggg

SEQ ID NO: 114643 - DNA, 26 bp, Homo sapiens
ctctgtgatggcattaatgtgggggc

SEQ ID NO: 114644 - DNA, 26 bp, Homo sapiens
tctgtgatggcattaatgtgggggcc

SEQ ID NO: 114645 - DNA, 26 bp, Homo sapiens
ctgtgatggcattaatgtgggggcca

SEQ ID NO: 114646 - DNA, 26 bp, Homo sapiens
tgtgatggcattaatgtgggggccac

SEQ ID NO: 114647 - DNA, 26 bp, Homo sapiens
gtgatggcattaatgtgggggccact

SEQ ID NO: 114648 - DNA, 26 bp, Homo sapiens
tgatggcattaatgtgggggccactc

SEQ ID NO: 114649 - DNA, 26 bp, Homo sapiens
gatggcattaatgtgggggccactca

SEQ ID NO: 114650 - DNA, 26 bp, Homo sapiens
atggcattaatgtgggggccactcag

SEQ ID NO: 114651 - DNA, 26 bp, Homo sapiens
tggcattaatgtgggggccactcagt

SEQ ID NO: 114652 - DNA, 26 bp, Homo sapiens
ggcattaatgtgggggccactcagtg

SEQ ID NO: 114653 - DNA, 26 bp, Homo sapiens
gcattaatgtgggggccactcagtgg

SEQ ID NO: 114654 - DNA, 26 bp, Homo sapiens
cattaatgtgggggccactcagtggt

SEQ ID NO: 114655 - DNA, 26 bp, Homo sapiens
attaatgtgggggccactcagtggtg

SEQ ID NO: 114656 - DNA, 26 bp, Homo sapiens
ttaatgtgggggccactcagtggtgc

SEQ ID NO: 114657 - DNA, 26 bp, Homo sapiens
taatgtgggggccactcagtggtgct

SEQ ID NO: 114658 - DNA, 26 bp, Homo sapiens
aatgtgggggccactcagtggtgctt

SEQ ID NO: 114659 - DNA, 26 bp, Homo sapiens
atgtgggggccactcagtggtgcttt

SEQ ID NO: 114660 - DNA, 26 bp, Homo sapiens
tgtgggggccactcagtggtgctttg

SEQ ID NO: 114661 - DNA, 26 bp, Homo sapiens
gtgggggccactcagtggtgctttgt

SEQ ID NO: 114662 - DNA, 26 bp, Homo sapiens
tgggggccactcagtggtgctttgtg

SEQ ID NO: 114663 - DNA, 26 bp, Homo sapiens
gggggccactcagtggtgctttgtgc

SEQ ID NO: 114664 - DNA, 26 bp, Homo sapiens
ggggccactcagtggtgctttgtgct

SEQ ID NO: 114665 - DNA, 26 bp, Homo sapiens
gggccactcagtggtgctttgtgctt

SEQ ID NO: 114666 - DNA, 26 bp, Homo sapiens
ggccactcagtggtgctttgtgctta

SEQ ID NO: 114667 - DNA, 26 bp, Homo sapiens
gccactcagtggtgctttgtgcttag

SEQ ID NO: 114668 - DNA, 26 bp, Homo sapiens
ccactcagtggtgctttgtgcttaga

SEQ ID NO: 114669 - DNA, 26 bp, Homo sapiens
cactcagtggtgctttgtgcttagag

SEQ ID NO: 114670 - DNA, 26 bp, Homo sapiens
actcagtggtgctttgtgcttagagt

SEQ ID NO: 114671 - DNA, 26 bp, Homo sapiens
ctcagtggtgctttgtgcttagagtt

SEQ ID NO: 114672 - DNA, 26 bp, Homo sapiens
tcagtggtgctttgtgcttagagtta

SEQ ID NO: 114673 - DNA, 26 bp, Homo sapiens
cagtggtgctttgtgcttagagttac

SEQ ID NO: 114674 - DNA, 26 bp, Homo sapiens
agtggtgctttgtgcttagagttacc

SEQ ID NO: 114675 - DNA, 26 bp, Homo sapiens
gtggtgctttgtgcttagagttaccc

SEQ ID NO: 114676 - DNA, 26 bp, Homo sapiens
tggtgctttgtgcttagagttaccca

SEQ ID NO: 114677 - DNA, 26 bp, Homo sapiens
ggtgctttgtgcttagagttacccag

SEQ ID NO: 114678 - DNA, 26 bp, Homo sapiens
gtgctttgtgcttagagttacccagg

SEQ ID NO: 114679 - DNA, 26 bp, Homo sapiens
tgctttgtgcttagagttacccagga

SEQ ID NO: 114680 - DNA, 26 bp, Homo sapiens
gctttgtgcttagagttacccaggat

SEQ ID NO: 114681 - DNA, 26 bp, Homo sapiens
ctttgtgcttagagttacccaggatg

SEQ ID NO: 114682 - DNA, 26 bp, Homo sapiens
tttgtgcttagagttacccaggatgg

SEQ ID NO: 114683 - DNA, 26 bp, Homo sapiens
ttgtgcttagagttacccaggatgga

SEQ ID NO: 114684 - DNA, 26 bp, Homo sapiens
tgtgcttagagttacccaggatggag

SEQ ID NO: 114685 - DNA, 26 bp, Homo sapiens
gtgcttagagttacccaggatggagc

SEQ ID NO: 114686 - DNA, 26 bp, Homo sapiens
tgcttagagttacccaggatggagct

SEQ ID NO: 114687 - DNA, 26 bp, Homo sapiens
gcttagagttacccaggatggagctg

SEQ ID NO: 114688 - DNA, 26 bp, Homo sapiens
cttagagttacccaggatggagctgc

SEQ ID NO: 114689 - DNA, 26 bp, Homo sapiens
ttagagttacccaggatggagctgca

SEQ ID NO: 114690 - DNA, 26 bp, Homo sapiens
tagagttacccaggatggagctgcat

SEQ ID NO: 114691 - DNA, 26 bp, Homo sapiens
agagttacccaggatggagctgcatc

SEQ ID NO: 114692 - DNA, 26 bp, Homo sapiens
gagttacccaggatggagctgcatcc

SEQ ID NO: 114693 - DNA, 26 bp, Homo sapiens
agttacccaggatggagctgcatcct

SEQ ID NO: 114694 - DNA, 26 bp, Homo sapiens
gttacccaggatggagctgcatcctc

SEQ ID NO: 114695 - DNA, 26 bp, Homo sapiens
ttacccaggatggagctgcatcctcc

SEQ ID NO: 114696 - DNA, 26 bp, Homo sapiens
tacccaggatggagctgcatcctcct

SEQ ID NO: 114697 - DNA, 26 bp, Homo sapiens
acccaggatggagctgcatcctcctt

SEQ ID NO: 114698 - DNA, 26 bp, Homo sapiens
cccaggatggagctgcatcctccttg

SEQ ID NO: 114699 - DNA, 26 bp, Homo sapiens
ccaggatggagctgcatcctccttga

SEQ ID NO: 114700 - DNA, 26 bp, Homo sapiens
caggatggagctgcatcctccttgat

SEQ ID NO: 114701 - DNA, 26 bp, Homo sapiens
aggatggagctgcatcctccttgatc

SEQ ID NO: 114702 - DNA, 26 bp, Homo sapiens
ggatggagctgcatcctccttgatcc

SEQ ID NO: 114703 - DNA, 26 bp, Homo sapiens
gatggagctgcatcctccttgatccc

SEQ ID NO: 114704 - DNA, 26 bp, Homo sapiens
atggagctgcatcctccttgatcccc

SEQ ID NO: 114705 - DNA, 26 bp, Homo sapiens
tggagctgcatcctccttgatcccct

SEQ ID NO: 114706 - DNA, 26 bp, Homo sapiens
ggagctgcatcctccttgatcccctg

SEQ ID NO: 114707 - DNA, 26 bp, Homo sapiens
gagctgcatcctccttgatcccctga

SEQ ID NO: 114708 - DNA, 26 bp, Homo sapiens
agctgcatcctccttgatcccctgag

SEQ ID NO: 114709 - DNA, 26 bp, Homo sapiens
gctgcatcctccttgatcccctgaga

SEQ ID NO: 114710 - DNA, 26 bp, Homo sapiens
ctgcatcctccttgatcccctgagag

SEQ ID NO: 114711 - DNA, 26 bp, Homo sapiens
tgcatcctccttgatcccctgagagt

SEQ ID NO: 114712 - DNA, 26 bp, Homo sapiens
gcatcctccttgatcccctgagagtg

SEQ ID NO: 114713 - DNA, 26 bp, Homo sapiens
catcctccttgatcccctgagagtgc

SEQ ID NO: 114714 - DNA, 26 bp, Homo sapiens
atcctccttgatcccctgagagtgca

SEQ ID NO: 114715 - DNA, 26 bp, Homo sapiens
tcctccttgatcccctgagagtgcat

SEQ ID NO: 114716 - DNA, 26 bp, Homo sapiens
cctccttgatcccctgagagtgcata

SEQ ID NO: 114717 - DNA, 26 bp, Homo sapiens
ctccttgatcccctgagagtgcatac

SEQ ID NO: 114718 - DNA, 26 bp, Homo sapiens
tccttgatcccctgagagtgcataca

SEQ ID NO: 114719 - DNA, 26 bp, Homo sapiens
ccttgatcccctgagagtgcatacac

SEQ ID NO: 114720 - DNA, 26 bp, Homo sapiens
cttgatcccctgagagtgcatacaca

SEQ ID NO: 114721 - DNA, 26 bp, Homo sapiens
ttgatcccctgagagtgcatacacac

SEQ ID NO: 114722 - DNA, 26 bp, Homo sapiens
tgatcccctgagagtgcatacacacg

SEQ ID NO: 114723 - DNA, 26 bp, Homo sapiens
gatcccctgagagtgcatacacacgg

SEQ ID NO: 114724 - DNA, 26 bp, Homo sapiens
atcccctgagagtgcatacacacgga

SEQ ID NO: 114725 - DNA, 26 bp, Homo sapiens
tcccctgagagtgcatacacacggat

SEQ ID NO: 114726 - DNA, 26 bp, Homo sapiens
cccctgagagtgcatacacacggatt

SEQ ID NO: 114727 - DNA, 26 bp, Homo sapiens
ccctgagagtgcatacacacggattt

SEQ ID NO: 114728 - DNA, 26 bp, Homo sapiens
cctgagagtgcatacacacggatttc

SEQ ID NO: 114729 - DNA, 26 bp, Homo sapiens
ctgagagtgcatacacacggatttca

SEQ ID NO: 114730 - DNA, 26 bp, Homo sapiens
tgagagtgcatacacacggatttcat

SEQ ID NO: 114731 - DNA, 26 bp, Homo sapiens
gagagtgcatacacacggatttcata

SEQ ID NO: 114732 - DNA, 26 bp, Homo sapiens
agagtgcatacacacggatttcataa

SEQ ID NO: 114733 - DNA, 26 bp, Homo sapiens
gagtgcatacacacggatttcataac

SEQ ID NO: 114734 - DNA, 26 bp, Homo sapiens
agtgcatacacacggatttcataaca

SEQ ID NO: 114735 - DNA, 26 bp, Homo sapiens
gtgcatacacacggatttcataacag

SEQ ID NO: 114736 - DNA, 26 bp, Homo sapiens
tgcatacacacggatttcataacaga

SEQ ID NO: 114737 - DNA, 26 bp, Homo sapiens
gcatacacacggatttcataacagat

SEQ ID NO: 114738 - DNA, 26 bp, Homo sapiens
catacacacggatttcataacagatg

SEQ ID NO: 114739 - DNA, 26 bp, Homo sapiens
atacacacggatttcataacagatgt

SEQ ID NO: 114740 - DNA, 26 bp, Homo sapiens
tacacacggatttcataacagatgta

SEQ ID NO: 114741 - DNA, 26 bp, Homo sapiens
acacacggatttcataacagatgtag

SEQ ID NO: 114742 - DNA, 26 bp, Homo sapiens
cacacggatttcataacagatgtagg

SEQ ID NO: 114743 - DNA, 26 bp, Homo sapiens
acacggatttcataacagatgtagga

SEQ ID NO: 114744 - DNA, 26 bp, Homo sapiens
cacggatttcataacagatgtaggat

SEQ ID NO: 114745 - DNA, 26 bp, Homo sapiens
acggatttcataacagatgtaggatt

SEQ ID NO: 114746 - DNA, 26 bp, Homo sapiens
cggatttcataacagatgtaggattt

SEQ ID NO: 114747 - DNA, 26 bp, Homo sapiens
ggatttcataacagatgtaggatttt

SEQ ID NO: 114748 - DNA, 26 bp, Homo sapiens
gatttcataacagatgtaggatttta

SEQ ID NO: 114749 - DNA, 26 bp, Homo sapiens
atttcataacagatgtaggattttat

SEQ ID NO: 114750 - DNA, 26 bp, Homo sapiens
tttcataacagatgtaggattttatg

SEQ ID NO: 114751 - DNA, 26 bp, Homo sapiens
ttcataacagatgtaggattttatgt

SEQ ID NO: 114752 - DNA, 26 bp, Homo sapiens
tcataacagatgtaggattttatgtt

SEQ ID NO: 114753 - DNA, 26 bp, Homo sapiens
cataacagatgtaggattttatgttc

SEQ ID NO: 114754 - DNA, 26 bp, Homo sapiens
ataacagatgtaggattttatgttct

SEQ ID NO: 114755 - DNA, 26 bp, Homo sapiens
taacagatgtaggattttatgttctc

SEQ ID NO: 114756 - DNA, 26 bp, Homo sapiens
aacagatgtaggattttatgttctct

SEQ ID NO: 114757 - DNA, 26 bp, Homo sapiens
acagatgtaggattttatgttctctg

SEQ ID NO: 114758 - DNA, 26 bp, Homo sapiens
cagatgtaggattttatgttctctga

SEQ ID NO: 114759 - DNA, 26 bp, Homo sapiens
agatgtaggattttatgttctctgaa

SEQ ID NO: 114760 - DNA, 26 bp, Homo sapiens
gatgtaggattttatgttctctgaaa

SEQ ID NO: 114761 - DNA, 26 bp, Homo sapiens
atgtaggattttatgttctctgaaat

SEQ ID NO: 114762 - DNA, 26 bp, Homo sapiens
tgtaggattttatgttctctgaaatc

SEQ ID NO: 114763 - DNA, 26 bp, Homo sapiens
gtaggattttatgttctctgaaatca

SEQ ID NO: 114764 - DNA, 26 bp, Homo sapiens
taggattttatgttctctgaaatcag

SEQ ID NO: 114765 - DNA, 26 bp, Homo sapiens
aggattttatgttctctgaaatcaga

SEQ ID NO: 114766 - DNA, 26 bp, Homo sapiens
ggattttatgttctctgaaatcagag

SEQ ID NO: 114767 - DNA, 26 bp, Homo sapiens
gattttatgttctctgaaatcagagc

SEQ ID NO: 114768 - DNA, 26 bp, Homo sapiens
attttatgttctctgaaatcagagca

SEQ ID NO: 114769 - DNA, 26 bp, Homo sapiens
ttttatgttctctgaaatcagagcag

SEQ ID NO: 114770 - DNA, 26 bp, Homo sapiens
tttatgttctctgaaatcagagcaga

SEQ ID NO: 114771 - DNA, 26 bp, Homo sapiens
ttatgttctctgaaatcagagcagac

SEQ ID NO: 114772 - DNA, 26 bp, Homo sapiens
tatgttctctgaaatcagagcagaca

SEQ ID NO: 114773 - DNA, 26 bp, Homo sapiens
atgttctctgaaatcagagcagacac

SEQ ID NO: 114774 - DNA, 26 bp, Homo sapiens
tgttctctgaaatcagagcagacaca

SEQ ID NO: 114775 - DNA, 26 bp, Homo sapiens
gttctctgaaatcagagcagacacat

SEQ ID NO: 114776 - DNA, 26 bp, Homo sapiens
ttctctgaaatcagagcagacacatt

SEQ ID NO: 114777 - DNA, 26 bp, Homo sapiens
tctctgaaatcagagcagacacattg

SEQ ID NO: 114778 - DNA, 26 bp, Homo sapiens
ctctgaaatcagagcagacacattgt

SEQ ID NO: 114779 - DNA, 26 bp, Homo sapiens
tctgaaatcagagcagacacattgta

SEQ ID NO: 114780 - DNA, 26 bp, Homo sapiens
ctgaaatcagagcagacacattgtag

SEQ ID NO: 114781 - DNA, 26 bp, Homo sapiens
tgaaatcagagcagacacattgtagg

SEQ ID NO: 114782 - DNA, 26 bp, Homo sapiens
gaaatcagagcagacacattgtaggg

SEQ ID NO: 114783 - DNA, 26 bp, Homo sapiens
aaatcagagcagacacattgtagggt

SEQ ID NO: 114784 - DNA, 26 bp, Homo sapiens
aatcagagcagacacattgtagggtc

SEQ ID NO: 114785 - DNA, 26 bp, Homo sapiens
atcagagcagacacattgtagggtcg

SEQ ID NO: 114786 - DNA, 26 bp, Homo sapiens
tcagagcagacacattgtagggtcga

SEQ ID NO: 114787 - DNA, 26 bp, Homo sapiens
cagagcagacacattgtagggtcgac

SEQ ID NO: 114788 - DNA, 26 bp, Homo sapiens
agagcagacacattgtagggtcgact

SEQ ID NO: 114789 - DNA, 26 bp, Homo sapiens
gagcagacacattgtagggtcgactc

SEQ ID NO: 114790 - DNA, 26 bp, Homo sapiens
agcagacacattgtagggtcgactcc

SEQ ID NO: 114791 - DNA, 26 bp, Homo sapiens
gcagacacattgtagggtcgactccg

SEQ ID NO: 114792 - DNA, 26 bp, Homo sapiens
cagacacattgtagggtcgactccgt

SEQ ID NO: 114793 - DNA, 26 bp, Homo sapiens
agacacattgtagggtcgactccgta

SEQ ID NO: 114794 - DNA, 26 bp, Homo sapiens
gacacattgtagggtcgactccgtag

SEQ ID NO: 114795 - DNA, 26 bp, Homo sapiens
acacattgtagggtcgactccgtagc

SEQ ID NO: 114796 - DNA, 26 bp, Homo sapiens
cacattgtagggtcgactccgtagcc

SEQ ID NO: 114797 - DNA, 26 bp, Homo sapiens
acattgtagggtcgactccgtagcca

SEQ ID NO: 114798 - DNA, 26 bp, Homo sapiens
cattgtagggtcgactccgtagccag

SEQ ID NO: 114799 - DNA, 26 bp, Homo sapiens
attgtagggtcgactccgtagccagt

SEQ ID NO: 114800 - DNA, 26 bp, Homo sapiens
ttgtagggtcgactccgtagccagtt

SEQ ID NO: 114801 - DNA, 26 bp, Homo sapiens
tgtagggtcgactccgtagccagttt

SEQ ID NO: 114802 - DNA, 26 bp, Homo sapiens
gtagggtcgactccgtagccagttta

SEQ ID NO: 114803 - DNA, 26 bp, Homo sapiens
tagggtcgactccgtagccagtttag

SEQ ID NO: 114804 - DNA, 26 bp, Homo sapiens
agggtcgactccgtagccagtttaga

SEQ ID NO: 114805 - DNA, 26 bp, Homo sapiens
gggtcgactccgtagccagtttagag

SEQ ID NO: 114806 - DNA, 26 bp, Homo sapiens
ggtcgactccgtagccagtttagagg

SEQ ID NO: 114807 - DNA, 26 bp, Homo sapiens
gtcgactccgtagccagtttagaggg

SEQ ID NO: 114808 - DNA, 26 bp, Homo sapiens
tcgactccgtagccagtttagaggga

SEQ ID NO: 114809 - DNA, 26 bp, Homo sapiens
cgactccgtagccagtttagagggac

SEQ ID NO: 114810 - DNA, 26 bp, Homo sapiens
gactccgtagccagtttagagggacc

SEQ ID NO: 114811 - DNA, 26 bp, Homo sapiens
actccgtagccagtttagagggacct

SEQ ID NO: 114812 - DNA, 26 bp, Homo sapiens
ctccgtagccagtttagagggacctg

SEQ ID NO: 114813 - DNA, 26 bp, Homo sapiens
tccgtagccagtttagagggacctgt

SEQ ID NO: 114814 - DNA, 26 bp, Homo sapiens
ccgtagccagtttagagggacctgtg

SEQ ID NO: 114815 - DNA, 26 bp, Homo sapiens
cgtagccagtttagagggacctgtgt

SEQ ID NO: 114816 - DNA, 26 bp, Homo sapiens
gtagccagtttagagggacctgtgtg

SEQ ID NO: 114817 - DNA, 26 bp, Homo sapiens
tagccagtttagagggacctgtgtgt

SEQ ID NO: 114818 - DNA, 26 bp, Homo sapiens
agccagtttagagggacctgtgtgtc

SEQ ID NO: 114819 - DNA, 26 bp, Homo sapiens
gccagtttagagggacctgtgtgtca

SEQ ID NO: 114820 - DNA, 26 bp, Homo sapiens
ccagtttagagggacctgtgtgtcac

SEQ ID NO: 114821 - DNA, 26 bp, Homo sapiens
cagtttagagggacctgtgtgtcacc

SEQ ID NO: 114822 - DNA, 26 bp, Homo sapiens
agtttagagggacctgtgtgtcaccc

SEQ ID NO: 114823 - DNA, 26 bp, Homo sapiens
gtttagagggacctgtgtgtcacccc

SEQ ID NO: 114824 - DNA, 26 bp, Homo sapiens
tttagagggacctgtgtgtcaccccc

SEQ ID NO: 114825 - DNA, 26 bp, Homo sapiens
ttagagggacctgtgtgtcaccccct

SEQ ID NO: 114826 - DNA, 26 bp, Homo sapiens
tagagggacctgtgtgtcaccccctg

SEQ ID NO: 114827 - DNA, 26 bp, Homo sapiens
agagggacctgtgtgtcaccccctgg

SEQ ID NO: 114828 - DNA, 26 bp, Homo sapiens
gagggacctgtgtgtcaccccctgga

SEQ ID NO: 114829 - DNA, 26 bp, Homo sapiens
agggacctgtgtgtcaccccctggat

SEQ ID NO: 114830 - DNA, 26 bp, Homo sapiens
gggacctgtgtgtcaccccctggatg

SEQ ID NO: 114831 - DNA, 26 bp, Homo sapiens
ggacctgtgtgtcaccccctggatgg

SEQ ID NO: 114832 - DNA, 26 bp, Homo sapiens
gacctgtgtgtcaccccctggatgga

SEQ ID NO: 114833 - DNA, 26 bp, Homo sapiens
acctgtgtgtcaccccctggatggag

SEQ ID NO: 114834 - DNA, 26 bp, Homo sapiens
cctgtgtgtcaccccctggatggagc

SEQ ID NO: 114835 - DNA, 26 bp, Homo sapiens
ctgtgtgtcaccccctggatggagct

SEQ ID NO: 114836 - DNA, 26 bp, Homo sapiens
tgtgtgtcaccccctggatggagctc

SEQ ID NO: 114837 - DNA, 26 bp, Homo sapiens
gtgtgtcaccccctggatggagctct

SEQ ID NO: 114838 - DNA, 26 bp, Homo sapiens
tgtgtcaccccctggatggagctctc

SEQ ID NO: 114839 - DNA, 26 bp, Homo sapiens
gtgtcaccccctggatggagctctct

SEQ ID NO: 114840 - DNA, 26 bp, Homo sapiens
tgtcaccccctggatggagctctctc

SEQ ID NO: 114841 - DNA, 26 bp, Homo sapiens
gtcaccccctggatggagctctctcc

SEQ ID NO: 114842 - DNA, 26 bp, Homo sapiens
tcaccccctggatggagctctctcca

SEQ ID NO: 114843 - DNA, 26 bp, Homo sapiens
caccccctggatggagctctctccat

SEQ ID NO: 114844 - DNA, 26 bp, Homo sapiens
accccctggatggagctctctccatt

SEQ ID NO: 114845 - DNA, 26 bp, Homo sapiens
ccccctggatggagctctctccattc

SEQ ID NO: 114846 - DNA, 26 bp, Homo sapiens
cccctggatggagctctctccattcc

SEQ ID NO: 114847 - DNA, 26 bp, Homo sapiens
ccctggatggagctctctccattcca

SEQ ID NO: 114848 - DNA, 26 bp, Homo sapiens
cctggatggagctctctccattccac

SEQ ID NO: 114849 - DNA, 26 bp, Homo sapiens
ctggatggagctctctccattccacc

SEQ ID NO: 114850 - DNA, 26 bp, Homo sapiens
tggatggagctctctccattccacca

SEQ ID NO: 114851 - DNA, 26 bp, Homo sapiens
ggatggagctctctccattccaccac

SEQ ID NO: 114852 - DNA, 26 bp, Homo sapiens
gatggagctctctccattccaccacg

SEQ ID NO: 114853 - DNA, 26 bp, Homo sapiens
atggagctctctccattccaccacgt

SEQ ID NO: 114854 - DNA, 26 bp, Homo sapiens
tggagctctctccattccaccacgta

SEQ ID NO: 114855 - DNA, 26 bp, Homo sapiens
ggagctctctccattccaccacgtac

SEQ ID NO: 114856 - DNA, 26 bp, Homo sapiens
gagctctctccattccaccacgtact

SEQ ID NO: 114857 - DNA, 26 bp, Homo sapiens
agctctctccattccaccacgtactc

SEQ ID NO: 114858 - DNA, 26 bp, Homo sapiens
gctctctccattccaccacgtactcc

SEQ ID NO: 114859 - DNA, 26 bp, Homo sapiens
ctctctccattccaccacgtactcct

SEQ ID NO: 114860 - DNA, 26 bp, Homo sapiens
tctctccattccaccacgtactcctg

SEQ ID NO: 114861 - DNA, 26 bp, Homo sapiens
ctctccattccaccacgtactcctga

SEQ ID NO: 114862 - DNA, 26 bp, Homo sapiens
tctccattccaccacgtactcctgaa

SEQ ID NO: 114863 - DNA, 26 bp, Homo sapiens
ctccattccaccacgtactcctgaac

SEQ ID NO: 114864 - DNA, 26 bp, Homo sapiens
tccattccaccacgtactcctgaaca

SEQ ID NO: 114865 - DNA, 26 bp, Homo sapiens
ccattccaccacgtactcctgaacag

SEQ ID NO: 114866 - DNA, 26 bp, Homo sapiens
cattccaccacgtactcctgaacagc

SEQ ID NO: 114867 - DNA, 26 bp, Homo sapiens
attccaccacgtactcctgaacagca

SEQ ID NO: 114868 - DNA, 26 bp, Homo sapiens
ttccaccacgtactcctgaacagcag

SEQ ID NO: 114869 - DNA, 26 bp, Homo sapiens
tccaccacgtactcctgaacagcaga

SEQ ID NO: 114870 - DNA, 26 bp, Homo sapiens
ccaccacgtactcctgaacagcagag

SEQ ID NO: 114871 - DNA, 26 bp, Homo sapiens
caccacgtactcctgaacagcagagg

SEQ ID NO: 114872 - DNA, 26 bp, Homo sapiens
accacgtactcctgaacagcagaggg

SEQ ID NO: 114873 - DNA, 26 bp, Homo sapiens
ccacgtactcctgaacagcagaggga

SEQ ID NO: 114874 - DNA, 26 bp, Homo sapiens
cacgtactcctgaacagcagagggat

SEQ ID NO: 114875 - DNA, 26 bp, Homo sapiens
acgtactcctgaacagcagagggatc

SEQ ID NO: 114876 - DNA, 26 bp, Homo sapiens
cgtactcctgaacagcagagggatct

SEQ ID NO: 114877 - DNA, 26 bp, Homo sapiens
gtactcctgaacagcagagggatctt

SEQ ID NO: 114878 - DNA, 26 bp, Homo sapiens
tactcctgaacagcagagggatcttt

SEQ ID NO: 114879 - DNA, 26 bp, Homo sapiens
actcctgaacagcagagggatctttc

SEQ ID NO: 114880 - DNA, 26 bp, Homo sapiens
ctcctgaacagcagagggatctttcc

SEQ ID NO: 114881 - DNA, 26 bp, Homo sapiens
tcctgaacagcagagggatctttcct

SEQ ID NO: 114882 - DNA, 26 bp, Homo sapiens
cctgaacagcagagggatctttcctg

SEQ ID NO: 114883 - DNA, 26 bp, Homo sapiens
ctgaacagcagagggatctttcctgg

SEQ ID NO: 114884 - DNA, 26 bp, Homo sapiens
tgaacagcagagggatctttcctggg

SEQ ID NO: 114885 - DNA, 26 bp, Homo sapiens
gaacagcagagggatctttcctggga

SEQ ID NO: 114886 - DNA, 26 bp, Homo sapiens
aacagcagagggatctttcctgggag

SEQ ID NO: 114887 - DNA, 26 bp, Homo sapiens
acagcagagggatctttcctgggagg

SEQ ID NO: 114888 - DNA, 26 bp, Homo sapiens
cagcagagggatctttcctgggaggc

SEQ ID NO: 114889 - DNA, 26 bp, Homo sapiens
agcagagggatctttcctgggaggct

SEQ ID NO: 114890 - DNA, 26 bp, Homo sapiens
gcagagggatctttcctgggaggctg

SEQ ID NO: 114891 - DNA, 26 bp, Homo sapiens
cagagggatctttcctgggaggctgc

SEQ ID NO: 114892 - DNA, 26 bp, Homo sapiens
agagggatctttcctgggaggctgcc

SEQ ID NO: 114893 - DNA, 26 bp, Homo sapiens
gagggatctttcctgggaggctgcca

SEQ ID NO: 114894 - DNA, 26 bp, Homo sapiens
agggatctttcctgggaggctgccaa

SEQ ID NO: 114895 - DNA, 26 bp, Homo sapiens
gggatctttcctgggaggctgccaag

SEQ ID NO: 114896 - DNA, 26 bp, Homo sapiens
ggatctttcctgggaggctgccaagt

SEQ ID NO: 114897 - DNA, 26 bp, Homo sapiens
gatctttcctgggaggctgccaagtc

SEQ ID NO: 114898 - DNA, 26 bp, Homo sapiens
atctttcctgggaggctgccaagtca

SEQ ID NO: 114899 - DNA, 26 bp, Homo sapiens
tctttcctgggaggctgccaagtcac

SEQ ID NO: 114900 - DNA, 26 bp, Homo sapiens
ctttcctgggaggctgccaagtcacc

SEQ ID NO: 114901 - DNA, 26 bp, Homo sapiens
tttcctgggaggctgccaagtcacca

SEQ ID NO: 114902 - DNA, 26 bp, Homo sapiens
ttcctgggaggctgccaagtcaccag

SEQ ID NO: 114903 - DNA, 26 bp, Homo sapiens
tcctgggaggctgccaagtcaccaga

SEQ ID NO: 114904 - DNA, 26 bp, Homo sapiens
cctgggaggctgccaagtcaccagaa

SEQ ID NO: 114905 - DNA, 26 bp, Homo sapiens
ctgggaggctgccaagtcaccagaat

SEQ ID NO: 114906 - DNA, 26 bp, Homo sapiens
tgggaggctgccaagtcaccagaatg

SEQ ID NO: 114907 - DNA, 26 bp, Homo sapiens
gggaggctgccaagtcaccagaatgt

SEQ ID NO: 114908 - DNA, 26 bp, Homo sapiens
ggaggctgccaagtcaccagaatgtt

SEQ ID NO: 114909 - DNA, 26 bp, Homo sapiens
gaggctgccaagtcaccagaatgttg

SEQ ID NO: 114910 - DNA, 26 bp, Homo sapiens
aggctgccaagtcaccagaatgttgt

SEQ ID NO: 114911 - DNA, 26 bp, Homo sapiens
ggctgccaagtcaccagaatgttgtc

SEQ ID NO: 114912 - DNA, 26 bp, Homo sapiens
gctgccaagtcaccagaatgttgtcc

SEQ ID NO: 114913 - DNA, 26 bp, Homo sapiens
ctgccaagtcaccagaatgttgtcca

SEQ ID NO: 114914 - DNA, 26 bp, Homo sapiens
tgccaagtcaccagaatgttgtccat

SEQ ID NO: 114915 - DNA, 26 bp, Homo sapiens
gccaagtcaccagaatgttgtccatg

SEQ ID NO: 114916 - DNA, 26 bp, Homo sapiens
ccaagtcaccagaatgttgtccatgc

SEQ ID NO: 114917 - DNA, 26 bp, Homo sapiens
caagtcaccagaatgttgtccatgcc

SEQ ID NO: 114918 - DNA, 26 bp, Homo sapiens
aagtcaccagaatgttgtccatgccc

SEQ ID NO: 114919 - DNA, 26 bp, Homo sapiens
agtcaccagaatgttgtccatgccct

SEQ ID NO: 114920 - DNA, 26 bp, Homo sapiens
gtcaccagaatgttgtccatgccctc

SEQ ID NO: 114921 - DNA, 26 bp, Homo sapiens
tcaccagaatgttgtccatgccctct

SEQ ID NO: 114922 - DNA, 26 bp, Homo sapiens
caccagaatgttgtccatgccctctg

SEQ ID NO: 114923 - DNA, 26 bp, Homo sapiens
accagaatgttgtccatgccctctga

SEQ ID NO: 114924 - DNA, 26 bp, Homo sapiens
ccagaatgttgtccatgccctctgag

SEQ ID NO: 114925 - DNA, 26 bp, Homo sapiens
cagaatgttgtccatgccctctgagt

SEQ ID NO: 114926 - DNA, 26 bp, Homo sapiens
agaatgttgtccatgccctctgagtt

SEQ ID NO: 114927 - DNA, 26 bp, Homo sapiens
gaatgttgtccatgccctctgagttt

SEQ ID NO: 114928 - DNA, 26 bp, Homo sapiens
aatgttgtccatgccctctgagtttg

SEQ ID NO: 114929 - DNA, 26 bp, Homo sapiens
atgttgtccatgccctctgagtttgc

SEQ ID NO: 114930 - DNA, 26 bp, Homo sapiens
tgttgtccatgccctctgagtttgca

SEQ ID NO: 114931 - DNA, 26 bp, Homo sapiens
gttgtccatgccctctgagtttgcag

SEQ ID NO: 114932 - DNA, 26 bp, Homo sapiens
ttgtccatgccctctgagtttgcaga

SEQ ID NO: 114933 - DNA, 26 bp, Homo sapiens
tgtccatgccctctgagtttgcagag

SEQ ID NO: 114934 - DNA, 26 bp, Homo sapiens
gtccatgccctctgagtttgcagaga

SEQ ID NO: 114935 - DNA, 26 bp, Homo sapiens
tccatgccctctgagtttgcagagac

SEQ ID NO: 114936 - DNA, 26 bp, Homo sapiens
ccatgccctctgagtttgcagagacc

SEQ ID NO: 114937 - DNA, 26 bp, Homo sapiens
catgccctctgagtttgcagagacct

SEQ ID NO: 114938 - DNA, 26 bp, Homo sapiens
atgccctctgagtttgcagagacctg

SEQ ID NO: 114939 - DNA, 26 bp, Homo sapiens
tgccctctgagtttgcagagacctgg

SEQ ID NO: 114940 - DNA, 26 bp, Homo sapiens
gccctctgagtttgcagagacctggc

SEQ ID NO: 114941 - DNA, 26 bp, Homo sapiens
ccctctgagtttgcagagacctggcg

SEQ ID NO: 114942 - DNA, 26 bp, Homo sapiens
cctctgagtttgcagagacctggcga

SEQ ID NO: 114943 - DNA, 26 bp, Homo sapiens
ctctgagtttgcagagacctggcgag

SEQ ID NO: 114944 - DNA, 26 bp, Homo sapiens
tctgagtttgcagagacctggcgagg

SEQ ID NO: 114945 - DNA, 26 bp, Homo sapiens
ctgagtttgcagagacctggcgagga

SEQ ID NO: 114946 - DNA, 26 bp, Homo sapiens
tgagtttgcagagacctggcgaggag

SEQ ID NO: 114947 - DNA, 26 bp, Homo sapiens
gagtttgcagagacctggcgaggagc

SEQ ID NO: 114948 - DNA, 26 bp, Homo sapiens
agtttgcagagacctggcgaggagcc

SEQ ID NO: 114949 - DNA, 26 bp, Homo sapiens
gtttgcagagacctggcgaggagcca

SEQ ID NO: 114950 - DNA, 26 bp, Homo sapiens
tttgcagagacctggcgaggagccag

SEQ ID NO: 114951 - DNA, 26 bp, Homo sapiens
ttgcagagacctggcgaggagccagc

SEQ ID NO: 114952 - DNA, 26 bp, Homo sapiens
tgcagagacctggcgaggagccagca

SEQ ID NO: 114953 - DNA, 26 bp, Homo sapiens
gcagagacctggcgaggagccagcaa

SEQ ID NO: 114954 - DNA, 26 bp, Homo sapiens
cagagacctggcgaggagccagcaac

SEQ ID NO: 114955 - DNA, 26 bp, Homo sapiens
agagacctggcgaggagccagcaacc

SEQ ID NO: 114956 - DNA, 26 bp, Homo sapiens
gagacctggcgaggagccagcaaccc

SEQ ID NO: 114957 - DNA, 26 bp, Homo sapiens
agacctggcgaggagccagcaaccct

SEQ ID NO: 114958 - DNA, 26 bp, Homo sapiens
gacctggcgaggagccagcaaccctg

SEQ ID NO: 114959 - DNA, 26 bp, Homo sapiens
acctggcgaggagccagcaaccctgc

SEQ ID NO: 114960 - DNA, 26 bp, Homo sapiens
cctggcgaggagccagcaaccctgcc

SEQ ID NO: 114961 - DNA, 26 bp, Homo sapiens
ctggcgaggagccagcaaccctgcct

SEQ ID NO: 114962 - DNA, 26 bp, Homo sapiens
tggcgaggagccagcaaccctgcctc

SEQ ID NO: 114963 - DNA, 26 bp, Homo sapiens
ggcgaggagccagcaaccctgcctca

SEQ ID NO: 114964 - DNA, 26 bp, Homo sapiens
gcgaggagccagcaaccctgcctcac

SEQ ID NO: 114965 - DNA, 26 bp, Homo sapiens
cgaggagccagcaaccctgcctcaca

SEQ ID NO: 114966 - DNA, 26 bp, Homo sapiens
gaggagccagcaaccctgcctcacac

SEQ ID NO: 114967 - DNA, 26 bp, Homo sapiens
aggagccagcaaccctgcctcacaca

SEQ ID NO: 114968 - DNA, 26 bp, Homo sapiens
ggagccagcaaccctgcctcacacag

SEQ ID NO: 114969 - DNA, 26 bp, Homo sapiens
gagccagcaaccctgcctcacacagg

SEQ ID NO: 114970 - DNA, 26 bp, Homo sapiens
agccagcaaccctgcctcacacaggt

SEQ ID NO: 114971 - DNA, 26 bp, Homo sapiens
gccagcaaccctgcctcacacaggtt

SEQ ID NO: 114972 - DNA, 26 bp, Homo sapiens
ccagcaaccctgcctcacacaggttc

SEQ ID NO: 114973 - DNA, 26 bp, Homo sapiens
cagcaaccctgcctcacacaggttca

SEQ ID NO: 114974 - DNA, 26 bp, Homo sapiens
agcaaccctgcctcacacaggttcat

SEQ ID NO: 114975 - DNA, 26 bp, Homo sapiens
gcaaccctgcctcacacaggttcatt

SEQ ID NO: 114976 - DNA, 26 bp, Homo sapiens
caaccctgcctcacacaggttcatta

SEQ ID NO: 114977 - DNA, 26 bp, Homo sapiens
aaccctgcctcacacaggttcattat

SEQ ID NO: 114978 - DNA, 26 bp, Homo sapiens
accctgcctcacacaggttcattatg

SEQ ID NO: 114979 - DNA, 26 bp, Homo sapiens
ccctgcctcacacaggttcattatgt

SEQ ID NO: 114980 - DNA, 26 bp, Homo sapiens
cctgcctcacacaggttcattatgtt

SEQ ID NO: 114981 - DNA, 26 bp, Homo sapiens
ctgcctcacacaggttcattatgtta

SEQ ID NO: 114982 - DNA, 26 bp, Homo sapiens
tgcctcacacaggttcattatgttaa

SEQ ID NO: 114983 - DNA, 26 bp, Homo sapiens
gcctcacacaggttcattatgttaat

SEQ ID NO: 114984 - DNA, 26 bp, Homo sapiens
cctcacacaggttcattatgttaata

SEQ ID NO: 114985 - DNA, 26 bp, Homo sapiens
ctcacacaggttcattatgttaatac

SEQ ID NO: 114986 - DNA, 26 bp, Homo sapiens
tcacacaggttcattatgttaatacg

SEQ ID NO: 114987 - DNA, 26 bp, Homo sapiens
cacacaggttcattatgttaatacga

SEQ ID NO: 114988 - DNA, 26 bp, Homo sapiens
acacaggttcattatgttaatacgag

SEQ ID NO: 114989 - DNA, 26 bp, Homo sapiens
cacaggttcattatgttaatacgagt

SEQ ID NO: 114990 - DNA, 26 bp, Homo sapiens
acaggttcattatgttaatacgagtg

SEQ ID NO: 114991 - DNA, 26 bp, Homo sapiens
caggttcattatgttaatacgagtgg

SEQ ID NO: 114992 - DNA, 26 bp, Homo sapiens
aggttcattatgttaatacgagtggg

SEQ ID NO: 114993 - DNA, 26 bp, Homo sapiens
ggttcattatgttaatacgagtgggc

SEQ ID NO: 114994 - DNA, 26 bp, Homo sapiens
gttcattatgttaatacgagtgggca

SEQ ID NO: 114995 - DNA, 26 bp, Homo sapiens
ttcattatgttaatacgagtgggcag

SEQ ID NO: 114996 - DNA, 26 bp, Homo sapiens
tcattatgttaatacgagtgggcaga

SEQ ID NO: 114997 - DNA, 26 bp, Homo sapiens
cattatgttaatacgagtgggcagag

SEQ ID NO: 114998 - DNA, 26 bp, Homo sapiens
attatgttaatacgagtgggcagaga

SEQ ID NO: 114999 - DNA, 26 bp, Homo sapiens
ttatgttaatacgagtgggcagagaa

SEQ ID NO: 115000 - DNA, 26 bp, Homo sapiens
tatgttaatacgagtgggcagagaac

SEQ ID NO: 115001 - DNA, 26 bp, Homo sapiens
atgttaatacgagtgggcagagaact

SEQ ID NO: 115002 - DNA, 26 bp, Homo sapiens
tgttaatacgagtgggcagagaactg

SEQ ID NO: 115003 - DNA, 26 bp, Homo sapiens
gttaatacgagtgggcagagaactgc

SEQ ID NO: 115004 - DNA, 26 bp, Homo sapiens
ttaatacgagtgggcagagaactgcc

SEQ ID NO: 115005 - DNA, 26 bp, Homo sapiens
taatacgagtgggcagagaactgcct

SEQ ID NO: 115006 - DNA, 26 bp, Homo sapiens
aatacgagtgggcagagaactgcctt

SEQ ID NO: 115007 - DNA, 26 bp, Homo sapiens
atacgagtgggcagagaactgccttt

SEQ ID NO: 115008 - DNA, 26 bp, Homo sapiens
tacgagtgggcagagaactgcctttt

SEQ ID NO: 115009 - DNA, 26 bp, Homo sapiens
acgagtgggcagagaactgccttttg

SEQ ID NO: 115010 - DNA, 26 bp, Homo sapiens
cgagtgggcagagaactgccttttga

SEQ ID NO: 115011 - DNA, 26 bp, Homo sapiens
gagtgggcagagaactgccttttgaa

SEQ ID NO: 115012 - DNA, 26 bp, Homo sapiens
agtgggcagagaactgccttttgaat

SEQ ID NO: 115013 - DNA, 26 bp, Homo sapiens
gtgggcagagaactgccttttgaatt

SEQ ID NO: 115014 - DNA, 26 bp, Homo sapiens
tgggcagagaactgccttttgaattt

SEQ ID NO: 115015 - DNA, 26 bp, Homo sapiens
gggcagagaactgccttttgaatttg

SEQ ID NO: 115016 - DNA, 26 bp, Homo sapiens
ggcagagaactgccttttgaatttgc

SEQ ID NO: 115017 - DNA, 26 bp, Homo sapiens
gcagagaactgccttttgaatttgct

SEQ ID NO: 115018 - DNA, 26 bp, Homo sapiens
cagagaactgccttttgaatttgctg

SEQ ID NO: 115019 - DNA, 26 bp, Homo sapiens
agagaactgccttttgaatttgctgc

SEQ ID NO: 115020 - DNA, 26 bp, Homo sapiens
gagaactgccttttgaatttgctgca

SEQ ID NO: 115021 - DNA, 26 bp, Homo sapiens
agaactgccttttgaatttgctgcag

SEQ ID NO: 115022 - DNA, 26 bp, Homo sapiens
gaactgccttttgaatttgctgcaga

SEQ ID NO: 115023 - DNA, 26 bp, Homo sapiens
aactgccttttgaatttgctgcagac

SEQ ID NO: 115024 - DNA, 26 bp, Homo sapiens
actgccttttgaatttgctgcagaca

SEQ ID NO: 115025 - DNA, 26 bp, Homo sapiens
ctgccttttgaatttgctgcagacac

SEQ ID NO: 115026 - DNA, 26 bp, Homo sapiens
tgccttttgaatttgctgcagacaca

SEQ ID NO: 115027 - DNA, 26 bp, Homo sapiens
gccttttgaatttgctgcagacacag

SEQ ID NO: 115028 - DNA, 26 bp, Homo sapiens
ccttttgaatttgctgcagacacagc

SEQ ID NO: 115029 - DNA, 26 bp, Homo sapiens
cttttgaatttgctgcagacacagcc

SEQ ID NO: 115030 - DNA, 26 bp, Homo sapiens
ttttgaatttgctgcagacacagcca

SEQ ID NO: 115031 - DNA, 26 bp, Homo sapiens
tttgaatttgctgcagacacagccac

SEQ ID NO: 115032 - DNA, 26 bp, Homo sapiens
ttgaatttgctgcagacacagccaca

SEQ ID NO: 115033 - DNA, 26 bp, Homo sapiens
tgaatttgctgcagacacagccacag

SEQ ID NO: 115034 - DNA, 26 bp, Homo sapiens
gaatttgctgcagacacagccacagc

SEQ ID NO: 115035 - DNA, 26 bp, Homo sapiens
aatttgctgcagacacagccacagcc

SEQ ID NO: 115036 - DNA, 26 bp, Homo sapiens
atttgctgcagacacagccacagccc

SEQ ID NO: 115037 - DNA, 26 bp, Homo sapiens
tttgctgcagacacagccacagccca

SEQ ID NO: 115038 - DNA, 26 bp, Homo sapiens
ttgctgcagacacagccacagcccaa

SEQ ID NO: 115039 - DNA, 26 bp, Homo sapiens
tgctgcagacacagccacagcccaat

SEQ ID NO: 115040 - DNA, 26 bp, Homo sapiens
gctgcagacacagccacagcccaatt

SEQ ID NO: 115041 - DNA, 26 bp, Homo sapiens
ctgcagacacagccacagcccaattt

SEQ ID NO: 115042 - DNA, 26 bp, Homo sapiens
tgcagacacagccacagcccaatttc

SEQ ID NO: 115043 - DNA, 26 bp, Homo sapiens
gcagacacagccacagcccaatttcc

SEQ ID NO: 115044 - DNA, 26 bp, Homo sapiens
cagacacagccacagcccaatttccg

SEQ ID NO: 115045 - DNA, 26 bp, Homo sapiens
agacacagccacagcccaatttccgg

SEQ ID NO: 115046 - DNA, 26 bp, Homo sapiens
gacacagccacagcccaatttccggt

SEQ ID NO: 115047 - DNA, 26 bp, Homo sapiens
acacagccacagcccaatttccggtt

SEQ ID NO: 115048 - DNA, 26 bp, Homo sapiens
cacagccacagcccaatttccggttc

SEQ ID NO: 115049 - DNA, 26 bp, Homo sapiens
acagccacagcccaatttccggttct

SEQ ID NO: 115050 - DNA, 26 bp, Homo sapiens
cagccacagcccaatttccggttcta

SEQ ID NO: 115051 - DNA, 26 bp, Homo sapiens
agccacagcccaatttccggttctag

SEQ ID NO: 115052 - DNA, 26 bp, Homo sapiens
gccacagcccaatttccggttctagg

SEQ ID NO: 115053 - DNA, 26 bp, Homo sapiens
ccacagcccaatttccggttctagga

SEQ ID NO: 115054 - DNA, 26 bp, Homo sapiens
cacagcccaatttccggttctaggaa

SEQ ID NO: 115055 - DNA, 26 bp, Homo sapiens
acagcccaatttccggttctaggaat

SEQ ID NO: 115056 - DNA, 26 bp, Homo sapiens
cagcccaatttccggttctaggaatg

SEQ ID NO: 115057 - DNA, 26 bp, Homo sapiens
agcccaatttccggttctaggaatga

SEQ ID NO: 115058 - DNA, 26 bp, Homo sapiens
gcccaatttccggttctaggaatgac

SEQ ID NO: 115059 - DNA, 26 bp, Homo sapiens
cccaatttccggttctaggaatgact

SEQ ID NO: 115060 - DNA, 26 bp, Homo sapiens
ccaatttccggttctaggaatgactg

SEQ ID NO: 115061 - DNA, 26 bp, Homo sapiens
caatttccggttctaggaatgactgt

SEQ ID NO: 115062 - DNA, 26 bp, Homo sapiens
aatttccggttctaggaatgactgtg

SEQ ID NO: 115063 - DNA, 26 bp, Homo sapiens
atttccggttctaggaatgactgtgg

SEQ ID NO: 115064 - DNA, 26 bp, Homo sapiens
tttccggttctaggaatgactgtggt

SEQ ID NO: 115065 - DNA, 26 bp, Homo sapiens
ttccggttctaggaatgactgtggtc

SEQ ID NO: 115066 - DNA, 26 bp, Homo sapiens
tccggttctaggaatgactgtggtcc

SEQ ID NO: 115067 - DNA, 26 bp, Homo sapiens
ccggttctaggaatgactgtggtcca

SEQ ID NO: 115068 - DNA, 26 bp, Homo sapiens
cggttctaggaatgactgtggtccag

SEQ ID NO: 115069 - DNA, 26 bp, Homo sapiens
ggttctaggaatgactgtggtccagg

SEQ ID NO: 115070 - DNA, 26 bp, Homo sapiens
gttctaggaatgactgtggtccagga

SEQ ID NO: 115071 - DNA, 26 bp, Homo sapiens
ttctaggaatgactgtggtccaggag

SEQ ID NO: 115072 - DNA, 26 bp, Homo sapiens
tctaggaatgactgtggtccaggagg

SEQ ID NO: 115073 - DNA, 26 bp, Homo sapiens
ctaggaatgactgtggtccaggaggt

SEQ ID NO: 115074 - DNA, 26 bp, Homo sapiens
taggaatgactgtggtccaggaggtg

SEQ ID NO: 115075 - DNA, 26 bp, Homo sapiens
aggaatgactgtggtccaggaggtgt

SEQ ID NO: 115076 - DNA, 26 bp, Homo sapiens
ggaatgactgtggtccaggaggtgtg

SEQ ID NO: 115077 - DNA, 26 bp, Homo sapiens
gaatgactgtggtccaggaggtgtgt

SEQ ID NO: 115078 - DNA, 26 bp, Homo sapiens
aatgactgtggtccaggaggtgtgtc

SEQ ID NO: 115079 - DNA, 26 bp, Homo sapiens
atgactgtggtccaggaggtgtgtcc

SEQ ID NO: 115080 - DNA, 26 bp, Homo sapiens
tgactgtggtccaggaggtgtgtcct

SEQ ID NO: 115081 - DNA, 26 bp, Homo sapiens
gactgtggtccaggaggtgtgtcctg

SEQ ID NO: 115082 - DNA, 26 bp, Homo sapiens
actgtggtccaggaggtgtgtcctgt

SEQ ID NO: 115083 - DNA, 26 bp, Homo sapiens
ctgtggtccaggaggtgtgtcctgtg

SEQ ID NO: 115084 - DNA, 26 bp, Homo sapiens
tgtggtccaggaggtgtgtcctgtga

SEQ ID NO: 115085 - DNA, 26 bp, Homo sapiens
gtggtccaggaggtgtgtcctgtgat

SEQ ID NO: 115086 - DNA, 26 bp, Homo sapiens
tggtccaggaggtgtgtcctgtgatg

SEQ ID NO: 115087 - DNA, 26 bp, Homo sapiens
ggtccaggaggtgtgtcctgtgatgt

SEQ ID NO: 115088 - DNA, 26 bp, Homo sapiens
gtccaggaggtgtgtcctgtgatgtt

SEQ ID NO: 115089 - DNA, 26 bp, Homo sapiens
tccaggaggtgtgtcctgtgatgttc

SEQ ID NO: 115090 - DNA, 26 bp, Homo sapiens
ccaggaggtgtgtcctgtgatgttct

SEQ ID NO: 115091 - DNA, 26 bp, Homo sapiens
caggaggtgtgtcctgtgatgttctg

SEQ ID NO: 115092 - DNA, 26 bp, Homo sapiens
aggaggtgtgtcctgtgatgttctgt

SEQ ID NO: 115093 - DNA, 26 bp, Homo sapiens
ggaggtgtgtcctgtgatgttctgtg

SEQ ID NO: 115094 - DNA, 26 bp, Homo sapiens
gaggtgtgtcctgtgatgttctgtgt

SEQ ID NO: 115095 - DNA, 26 bp, Homo sapiens
aggtgtgtcctgtgatgttctgtgtc

SEQ ID NO: 115096 - DNA, 26 bp, Homo sapiens
ggtgtgtcctgtgatgttctgtgtca

SEQ ID NO: 115097 - DNA, 26 bp, Homo sapiens
gtgtgtcctgtgatgttctgtgtcat

SEQ ID NO: 115098 - DNA, 26 bp, Homo sapiens
tgtgtcctgtgatgttctgtgtcatg

SEQ ID NO: 115099 - DNA, 26 bp, Homo sapiens
gtgtcctgtgatgttctgtgtcatgg

SEQ ID NO: 115100 - DNA, 26 bp, Homo sapiens
tgtcctgtgatgttctgtgtcatggc

SEQ ID NO: 115101 - DNA, 26 bp, Homo sapiens
gtcctgtgatgttctgtgtcatggct

SEQ ID NO: 115102 - DNA, 26 bp, Homo sapiens
tcctgtgatgttctgtgtcatggctt

SEQ ID NO: 115103 - DNA, 26 bp, Homo sapiens
cctgtgatgttctgtgtcatggcttt

SEQ ID NO: 115104 - DNA, 26 bp, Homo sapiens
ctgtgatgttctgtgtcatggctttc

SEQ ID NO: 115105 - DNA, 26 bp, Homo sapiens
tgtgatgttctgtgtcatggctttcc

SEQ ID NO: 115106 - DNA, 26 bp, Homo sapiens
gtgatgttctgtgtcatggctttccc

SEQ ID NO: 115107 - DNA, 26 bp, Homo sapiens
tgatgttctgtgtcatggctttccct

SEQ ID NO: 115108 - DNA, 26 bp, Homo sapiens
gatgttctgtgtcatggctttccctc

SEQ ID NO: 115109 - DNA, 26 bp, Homo sapiens
atgttctgtgtcatggctttccctcc

SEQ ID NO: 115110 - DNA, 26 bp, Homo sapiens
tgttctgtgtcatggctttccctcct

SEQ ID NO: 115111 - DNA, 26 bp, Homo sapiens
gttctgtgtcatggctttccctcctg

SEQ ID NO: 115112 - DNA, 26 bp, Homo sapiens
ttctgtgtcatggctttccctcctgt

SEQ ID NO: 115113 - DNA, 26 bp, Homo sapiens
tctgtgtcatggctttccctcctgtc

SEQ ID NO: 115114 - DNA, 26 bp, Homo sapiens
ctgtgtcatggctttccctcctgtca

SEQ ID NO: 115115 - DNA, 26 bp, Homo sapiens
tgtgtcatggctttccctcctgtcag

SEQ ID NO: 115116 - DNA, 26 bp, Homo sapiens
gtgtcatggctttccctcctgtcagc

SEQ ID NO: 115117 - DNA, 26 bp, Homo sapiens
tgtcatggctttccctcctgtcagct

SEQ ID NO: 115118 - DNA, 26 bp, Homo sapiens
gtcatggctttccctcctgtcagctc

SEQ ID NO: 115119 - DNA, 26 bp, Homo sapiens
tcatggctttccctcctgtcagctcc

SEQ ID NO: 115120 - DNA, 26 bp, Homo sapiens
catggctttccctcctgtcagctcct

SEQ ID NO: 115121 - DNA, 26 bp, Homo sapiens
atggctttccctcctgtcagctcctg

SEQ ID NO: 115122 - DNA, 26 bp, Homo sapiens
tggctttccctcctgtcagctcctgc

SEQ ID NO: 115123 - DNA, 26 bp, Homo sapiens
ggctttccctcctgtcagctcctgca

SEQ ID NO: 115124 - DNA, 26 bp, Homo sapiens
gctttccctcctgtcagctcctgcaa

SEQ ID NO: 115125 - DNA, 26 bp, Homo sapiens
ctttccctcctgtcagctcctgcaag

SEQ ID NO: 115126 - DNA, 26 bp, Homo sapiens
tttccctcctgtcagctcctgcaagg

SEQ ID NO: 115127 - DNA, 26 bp, Homo sapiens
ttccctcctgtcagctcctgcaaggt

SEQ ID NO: 115128 - DNA, 26 bp, Homo sapiens
tccctcctgtcagctcctgcaaggtc

SEQ ID NO: 115129 - DNA, 26 bp, Homo sapiens
ccctcctgtcagctcctgcaaggtca

SEQ ID NO: 115130 - DNA, 26 bp, Homo sapiens
cctcctgtcagctcctgcaaggtcac

SEQ ID NO: 115131 - DNA, 26 bp, Homo sapiens
ctcctgtcagctcctgcaaggtcacc

SEQ ID NO: 115132 - DNA, 26 bp, Homo sapiens
tcctgtcagctcctgcaaggtcacct

SEQ ID NO: 115133 - DNA, 26 bp, Homo sapiens
cctgtcagctcctgcaaggtcacctg

SEQ ID NO: 115134 - DNA, 26 bp, Homo sapiens
ctgtcagctcctgcaaggtcacctga

SEQ ID NO: 115135 - DNA, 26 bp, Homo sapiens
tgtcagctcctgcaaggtcacctgat

SEQ ID NO: 115136 - DNA, 26 bp, Homo sapiens
gtcagctcctgcaaggtcacctgata

SEQ ID NO: 115137 - DNA, 26 bp, Homo sapiens
tcagctcctgcaaggtcacctgatag

SEQ ID NO: 115138 - DNA, 26 bp, Homo sapiens
cagctcctgcaaggtcacctgatagt

SEQ ID NO: 115139 - DNA, 26 bp, Homo sapiens
agctcctgcaaggtcacctgatagtg

SEQ ID NO: 115140 - DNA, 26 bp, Homo sapiens
gctcctgcaaggtcacctgatagtgg

SEQ ID NO: 115141 - DNA, 26 bp, Homo sapiens
ctcctgcaaggtcacctgatagtgga

SEQ ID NO: 115142 - DNA, 26 bp, Homo sapiens
tcctgcaaggtcacctgatagtggag

SEQ ID NO: 115143 - DNA, 26 bp, Homo sapiens
cctgcaaggtcacctgatagtggaga

SEQ ID NO: 115144 - DNA, 26 bp, Homo sapiens
ctgcaaggtcacctgatagtggagaa

SEQ ID NO: 115145 - DNA, 26 bp, Homo sapiens
tgcaaggtcacctgatagtggagaat

SEQ ID NO: 115146 - DNA, 26 bp, Homo sapiens
gcaaggtcacctgatagtggagaatt

SEQ ID NO: 115147 - DNA, 26 bp, Homo sapiens
caaggtcacctgatagtggagaattt

SEQ ID NO: 115148 - DNA, 26 bp, Homo sapiens
aaggtcacctgatagtggagaatttt

SEQ ID NO: 115149 - DNA, 26 bp, Homo sapiens
aggtcacctgatagtggagaattttt

SEQ ID NO: 115150 - DNA, 26 bp, Homo sapiens
ggtcacctgatagtggagaatttttc

SEQ ID NO: 115151 - DNA, 26 bp, Homo sapiens
gtcacctgatagtggagaatttttcc

SEQ ID NO: 115152 - DNA, 26 bp, Homo sapiens
tcacctgatagtggagaatttttcct

SEQ ID NO: 115153 - DNA, 26 bp, Homo sapiens
cacctgatagtggagaatttttcctc

SEQ ID NO: 115154 - DNA, 26 bp, Homo sapiens
acctgatagtggagaatttttcctct

SEQ ID NO: 115155 - DNA, 26 bp, Homo sapiens
cctgatagtggagaatttttcctctt

SEQ ID NO: 115156 - DNA, 26 bp, Homo sapiens
ctgatagtggagaatttttcctcttg

SEQ ID NO: 115157 - DNA, 26 bp, Homo sapiens
tgatagtggagaatttttcctcttgc

SEQ ID NO: 115158 - DNA, 26 bp, Homo sapiens
gatagtggagaatttttcctcttgcc

SEQ ID NO: 115159 - DNA, 26 bp, Homo sapiens
atagtggagaatttttcctcttgcct

SEQ ID NO: 115160 - DNA, 26 bp, Homo sapiens
tagtggagaatttttcctcttgcctc

SEQ ID NO: 115161 - DNA, 26 bp, Homo sapiens
agtggagaatttttcctcttgcctct

SEQ ID NO: 115162 - DNA, 26 bp, Homo sapiens
gtggagaatttttcctcttgcctctg

SEQ ID NO: 115163 - DNA, 26 bp, Homo sapiens
tggagaatttttcctcttgcctctga

SEQ ID NO: 115164 - DNA, 26 bp, Homo sapiens
ggagaatttttcctcttgcctctgag

SEQ ID NO: 115165 - DNA, 26 bp, Homo sapiens
gagaatttttcctcttgcctctgaga

SEQ ID NO: 115166 - DNA, 26 bp, Homo sapiens
agaatttttcctcttgcctctgagac

SEQ ID NO: 115167 - DNA, 26 bp, Homo sapiens
gaatttttcctcttgcctctgagaca

SEQ ID NO: 115168 - DNA, 26 bp, Homo sapiens
aatttttcctcttgcctctgagacac

SEQ ID NO: 115169 - DNA, 26 bp, Homo sapiens
atttttcctcttgcctctgagacact

SEQ ID NO: 115170 - DNA, 26 bp, Homo sapiens
tttttcctcttgcctctgagacactc

SEQ ID NO: 115171 - DNA, 26 bp, Homo sapiens
ttttcctcttgcctctgagacactca

SEQ ID NO: 115172 - DNA, 26 bp, Homo sapiens
tttcctcttgcctctgagacactcag

SEQ ID NO: 115173 - DNA, 26 bp, Homo sapiens
ttcctcttgcctctgagacactcaga

SEQ ID NO: 115174 - DNA, 26 bp, Homo sapiens
tcctcttgcctctgagacactcagat

SEQ ID NO: 115175 - DNA, 26 bp, Homo sapiens
cctcttgcctctgagacactcagatt

SEQ ID NO: 115176 - DNA, 26 bp, Homo sapiens
ctcttgcctctgagacactcagattc

SEQ ID NO: 115177 - DNA, 26 bp, Homo sapiens
tcttgcctctgagacactcagattct

SEQ ID NO: 115178 - DNA, 26 bp, Homo sapiens
cttgcctctgagacactcagattctt

SEQ ID NO: 115179 - DNA, 26 bp, Homo sapiens
ttgcctctgagacactcagattcttc

SEQ ID NO: 115180 - DNA, 26 bp, Homo sapiens
tgcctctgagacactcagattcttcc

SEQ ID NO: 115181 - DNA, 26 bp, Homo sapiens
gcctctgagacactcagattcttcca

SEQ ID NO: 115182 - DNA, 26 bp, Homo sapiens
cctctgagacactcagattcttccag

SEQ ID NO: 115183 - DNA, 26 bp, Homo sapiens
ctctgagacactcagattcttccaga

SEQ ID NO: 115184 - DNA, 26 bp, Homo sapiens
tctgagacactcagattcttccagaa

SEQ ID NO: 115185 - DNA, 26 bp, Homo sapiens
ctgagacactcagattcttccagaaa

SEQ ID NO: 115186 - DNA, 26 bp, Homo sapiens
tgagacactcagattcttccagaaaa

SEQ ID NO: 115187 - DNA, 26 bp, Homo sapiens
gagacactcagattcttccagaaaag

SEQ ID NO: 115188 - DNA, 26 bp, Homo sapiens
agacactcagattcttccagaaaaga

SEQ ID NO: 115189 - DNA, 26 bp, Homo sapiens
gacactcagattcttccagaaaagag

SEQ ID NO: 115190 - DNA, 26 bp, Homo sapiens
acactcagattcttccagaaaagaga

SEQ ID NO: 115191 - DNA, 26 bp, Homo sapiens
cactcagattcttccagaaaagagaa

SEQ ID NO: 115192 - DNA, 26 bp, Homo sapiens
actcagattcttccagaaaagagaaa

SEQ ID NO: 115193 - DNA, 26 bp, Homo sapiens
ctcagattcttccagaaaagagaaat

SEQ ID NO: 115194 - DNA, 26 bp, Homo sapiens
tcagattcttccagaaaagagaaatc

SEQ ID NO: 115195 - DNA, 26 bp, Homo sapiens
cagattcttccagaaaagagaaatct

SEQ ID NO: 115196 - DNA, 26 bp, Homo sapiens
agattcttccagaaaagagaaatctg

SEQ ID NO: 115197 - DNA, 26 bp, Homo sapiens
gattcttccagaaaagagaaatctgt

SEQ ID NO: 115198 - DNA, 26 bp, Homo sapiens
attcttccagaaaagagaaatctgtt

SEQ ID NO: 115199 - DNA, 26 bp, Homo sapiens
ttcttccagaaaagagaaatctgttg

SEQ ID NO: 115200 - DNA, 26 bp, Homo sapiens
tcttccagaaaagagaaatctgttgt

SEQ ID NO: 115201 - DNA, 26 bp, Homo sapiens
cttccagaaaagagaaatctgttgtc

SEQ ID NO: 115202 - DNA, 26 bp, Homo sapiens
ttccagaaaagagaaatctgttgtct

SEQ ID NO: 115203 - DNA, 26 bp, Homo sapiens
tccagaaaagagaaatctgttgtcta

SEQ ID NO: 115204 - DNA, 26 bp, Homo sapiens
ccagaaaagagaaatctgttgtctac

SEQ ID NO: 115205 - DNA, 26 bp, Homo sapiens
cagaaaagagaaatctgttgtctact

SEQ ID NO: 115206 - DNA, 26 bp, Homo sapiens
agaaaagagaaatctgttgtctactg

SEQ ID NO: 115207 - DNA, 26 bp, Homo sapiens
gaaaagagaaatctgttgtctactgt

SEQ ID NO: 115208 - DNA, 26 bp, Homo sapiens
aaaagagaaatctgttgtctactgta

SEQ ID NO: 115209 - DNA, 26 bp, Homo sapiens
aaagagaaatctgttgtctactgtag

SEQ ID NO: 115210 - DNA, 26 bp, Homo sapiens
aagagaaatctgttgtctactgtagt

SEQ ID NO: 115211 - DNA, 26 bp, Homo sapiens
agagaaatctgttgtctactgtagtc

SEQ ID NO: 115212 - DNA, 26 bp, Homo sapiens
gagaaatctgttgtctactgtagtca

SEQ ID NO: 115213 - DNA, 26 bp, Homo sapiens
agaaatctgttgtctactgtagtcaa

SEQ ID NO: 115214 - DNA, 26 bp, Homo sapiens
gaaatctgttgtctactgtagtcaat

SEQ ID NO: 115215 - DNA, 26 bp, Homo sapiens
aaatctgttgtctactgtagtcaatg

SEQ ID NO: 115216 - DNA, 26 bp, Homo sapiens
aatctgttgtctactgtagtcaatgt

SEQ ID NO: 115217 - DNA, 26 bp, Homo sapiens
atctgttgtctactgtagtcaatgtg

SEQ ID NO: 115218 - DNA, 26 bp, Homo sapiens
tctgttgtctactgtagtcaatgtgc

SEQ ID NO: 115219 - DNA, 26 bp, Homo sapiens
ctgttgtctactgtagtcaatgtgcc

SEQ ID NO: 115220 - DNA, 26 bp, Homo sapiens
tgttgtctactgtagtcaatgtgccg

SEQ ID NO: 115221 - DNA, 26 bp, Homo sapiens
gttgtctactgtagtcaatgtgccgt

SEQ ID NO: 115222 - DNA, 26 bp, Homo sapiens
ttgtctactgtagtcaatgtgccgtt

SEQ ID NO: 115223 - DNA, 26 bp, Homo sapiens
tgtctactgtagtcaatgtgccgttt

SEQ ID NO: 115224 - DNA, 26 bp, Homo sapiens
gtctactgtagtcaatgtgccgtttc

SEQ ID NO: 115225 - DNA, 26 bp, Homo sapiens
tctactgtagtcaatgtgccgtttca

SEQ ID NO: 115226 - DNA, 26 bp, Homo sapiens
ctactgtagtcaatgtgccgtttcat

SEQ ID NO: 115227 - DNA, 26 bp, Homo sapiens
tactgtagtcaatgtgccgtttcatg

SEQ ID NO: 115228 - DNA, 26 bp, Homo sapiens
actgtagtcaatgtgccgtttcatgt

SEQ ID NO: 115229 - DNA, 26 bp, Homo sapiens
ctgtagtcaatgtgccgtttcatgta

SEQ ID NO: 115230 - DNA, 26 bp, Homo sapiens
tgtagtcaatgtgccgtttcatgtac

SEQ ID NO: 115231 - DNA, 26 bp, Homo sapiens
gtagtcaatgtgccgtttcatgtacc

SEQ ID NO: 115232 - DNA, 26 bp, Homo sapiens
tagtcaatgtgccgtttcatgtacca

SEQ ID NO: 115233 - DNA, 26 bp, Homo sapiens
agtcaatgtgccgtttcatgtaccag

SEQ ID NO: 115234 - DNA, 26 bp, Homo sapiens
gtcaatgtgccgtttcatgtaccaga

SEQ ID NO: 115235 - DNA, 26 bp, Homo sapiens
tcaatgtgccgtttcatgtaccagac

SEQ ID NO: 115236 - DNA, 26 bp, Homo sapiens
caatgtgccgtttcatgtaccagaca

SEQ ID NO: 115237 - DNA, 26 bp, Homo sapiens
aatgtgccgtttcatgtaccagacat

SEQ ID NO: 115238 - DNA, 26 bp, Homo sapiens
atgtgccgtttcatgtaccagacatc

SEQ ID NO: 115239 - DNA, 26 bp, Homo sapiens
tgtgccgtttcatgtaccagacatct

SEQ ID NO: 115240 - DNA, 26 bp, Homo sapiens
gtgccgtttcatgtaccagacatcta

SEQ ID NO: 115241 - DNA, 26 bp, Homo sapiens
tgccgtttcatgtaccagacatctaa

SEQ ID NO: 115242 - DNA, 26 bp, Homo sapiens
gccgtttcatgtaccagacatctaac

SEQ ID NO: 115243 - DNA, 26 bp, Homo sapiens
ccgtttcatgtaccagacatctaaca

SEQ ID NO: 115244 - DNA, 26 bp, Homo sapiens
cgtttcatgtaccagacatctaacat

SEQ ID NO: 115245 - DNA, 26 bp, Homo sapiens
gtttcatgtaccagacatctaacatc

SEQ ID NO: 115246 - DNA, 26 bp, Homo sapiens
tttcatgtaccagacatctaacatcc

SEQ ID NO: 115247 - DNA, 26 bp, Homo sapiens
ttcatgtaccagacatctaacatccc

SEQ ID NO: 115248 - DNA, 26 bp, Homo sapiens
tcatgtaccagacatctaacatccca

SEQ ID NO: 115249 - DNA, 26 bp, Homo sapiens
catgtaccagacatctaacatcccag

SEQ ID NO: 115250 - DNA, 26 bp, Homo sapiens
atgtaccagacatctaacatcccagt

SEQ ID NO: 115251 - DNA, 26 bp, Homo sapiens
tgtaccagacatctaacatcccagta

SEQ ID NO: 115252 - DNA, 26 bp, Homo sapiens
gtaccagacatctaacatcccagtag

SEQ ID NO: 115253 - DNA, 26 bp, Homo sapiens
taccagacatctaacatcccagtagg

SEQ ID NO: 115254 - DNA, 26 bp, Homo sapiens
accagacatctaacatcccagtaggc

SEQ ID NO: 115255 - DNA, 26 bp, Homo sapiens
ccagacatctaacatcccagtaggct

SEQ ID NO: 115256 - DNA, 26 bp, Homo sapiens
cagacatctaacatcccagtaggctc

SEQ ID NO: 115257 - DNA, 26 bp, Homo sapiens
agacatctaacatcccagtaggctct

SEQ ID NO: 115258 - DNA, 26 bp, Homo sapiens
gacatctaacatcccagtaggctctt

SEQ ID NO: 115259 - DNA, 26 bp, Homo sapiens
acatctaacatcccagtaggctcttc

SEQ ID NO: 115260 - DNA, 26 bp, Homo sapiens
catctaacatcccagtaggctcttct

SEQ ID NO: 115261 - DNA, 26 bp, Homo sapiens
atctaacatcccagtaggctcttctt

SEQ ID NO: 115262 - DNA, 26 bp, Homo sapiens
tctaacatcccagtaggctcttcttc

SEQ ID NO: 115263 - DNA, 26 bp, Homo sapiens
ctaacatcccagtaggctcttcttct

SEQ ID NO: 115264 - DNA, 26 bp, Homo sapiens
taacatcccagtaggctcttcttctg

SEQ ID NO: 115265 - DNA, 26 bp, Homo sapiens
aacatcccagtaggctcttcttctgg

SEQ ID NO: 115266 - DNA, 26 bp, Homo sapiens
acatcccagtaggctcttcttctggt

SEQ ID NO: 115267 - DNA, 26 bp, Homo sapiens
catcccagtaggctcttcttctggtg

SEQ ID NO: 115268 - DNA, 26 bp, Homo sapiens
atcccagtaggctcttcttctggtgt

SEQ ID NO: 115269 - DNA, 26 bp, Homo sapiens
tcccagtaggctcttcttctggtgtt

SEQ ID NO: 115270 - DNA, 26 bp, Homo sapiens
cccagtaggctcttcttctggtgttt

SEQ ID NO: 115271 - DNA, 26 bp, Homo sapiens
ccagtaggctcttcttctggtgtttg

SEQ ID NO: 115272 - DNA, 26 bp, Homo sapiens
cagtaggctcttcttctggtgtttgt

SEQ ID NO: 115273 - DNA, 26 bp, Homo sapiens
agtaggctcttcttctggtgtttgtg

SEQ ID NO: 115274 - DNA, 26 bp, Homo sapiens
gtaggctcttcttctggtgtttgtgc

SEQ ID NO: 115275 - DNA, 26 bp, Homo sapiens
taggctcttcttctggtgtttgtgct

SEQ ID NO: 115276 - DNA, 26 bp, Homo sapiens
aggctcttcttctggtgtttgtgctc

SEQ ID NO: 115277 - DNA, 26 bp, Homo sapiens
ggctcttcttctggtgtttgtgctct

SEQ ID NO: 115278 - DNA, 26 bp, Homo sapiens
gctcttcttctggtgtttgtgctctc

SEQ ID NO: 115279 - DNA, 26 bp, Homo sapiens
ctcttcttctggtgtttgtgctctca

SEQ ID NO: 115280 - DNA, 26 bp, Homo sapiens
tcttcttctggtgtttgtgctctcaa

SEQ ID NO: 115281 - DNA, 26 bp, Homo sapiens
cttcttctggtgtttgtgctctcaat

SEQ ID NO: 115282 - DNA, 26 bp, Homo sapiens
ttcttctggtgtttgtgctctcaatg

SEQ ID NO: 115283 - DNA, 26 bp, Homo sapiens
tcttctggtgtttgtgctctcaatga

SEQ ID NO: 115284 - DNA, 26 bp, Homo sapiens
cttctggtgtttgtgctctcaatgat

SEQ ID NO: 115285 - DNA, 26 bp, Homo sapiens
ttctggtgtttgtgctctcaatgatt

SEQ ID NO: 115286 - DNA, 26 bp, Homo sapiens
tctggtgtttgtgctctcaatgattc

SEQ ID NO: 115287 - DNA, 26 bp, Homo sapiens
ctggtgtttgtgctctcaatgattca

SEQ ID NO: 115288 - DNA, 26 bp, Homo sapiens
tggtgtttgtgctctcaatgattcac

SEQ ID NO: 115289 - DNA, 26 bp, Homo sapiens
ggtgtttgtgctctcaatgattcact

SEQ ID NO: 115290 - DNA, 26 bp, Homo sapiens
gtgtttgtgctctcaatgattcactc

SEQ ID NO: 115291 - DNA, 26 bp, Homo sapiens
tgtttgtgctctcaatgattcactcc

SEQ ID NO: 115292 - DNA, 26 bp, Homo sapiens
gtttgtgctctcaatgattcactcca

SEQ ID NO: 115293 - DNA, 26 bp, Homo sapiens
tttgtgctctcaatgattcactccaa

SEQ ID NO: 115294 - DNA, 26 bp, Homo sapiens
ttgtgctctcaatgattcactccaat

SEQ ID NO: 115295 - DNA, 26 bp, Homo sapiens
tgtgctctcaatgattcactccaatc

SEQ ID NO: 115296 - DNA, 26 bp, Homo sapiens
gtgctctcaatgattcactccaatca

SEQ ID NO: 115297 - DNA, 26 bp, Homo sapiens
tgctctcaatgattcactccaatcac

SEQ ID NO: 115298 - DNA, 26 bp, Homo sapiens
gctctcaatgattcactccaatcact

SEQ ID NO: 115299 - DNA, 26 bp, Homo sapiens
ctctcaatgattcactccaatcactc

SEQ ID NO: 115300 - DNA, 26 bp, Homo sapiens
tctcaatgattcactccaatcactcc

SEQ ID NO: 115301 - DNA, 26 bp, Homo sapiens
ctcaatgattcactccaatcactcca

SEQ ID NO: 115302 - DNA, 26 bp, Homo sapiens
tcaatgattcactccaatcactccaa

SEQ ID NO: 115303 - DNA, 26 bp, Homo sapiens
caatgattcactccaatcactccaac

SEQ ID NO: 115304 - DNA, 26 bp, Homo sapiens
aatgattcactccaatcactccaact

SEQ ID NO: 115305 - DNA, 26 bp, Homo sapiens
atgattcactccaatcactccaactt

SEQ ID NO: 115306 - DNA, 26 bp, Homo sapiens
tgattcactccaatcactccaacttc

SEQ ID NO: 115307 - DNA, 26 bp, Homo sapiens
gattcactccaatcactccaacttcc

SEQ ID NO: 115308 - DNA, 26 bp, Homo sapiens
attcactccaatcactccaacttccc

SEQ ID NO: 115309 - DNA, 26 bp, Homo sapiens
ttcactccaatcactccaacttccct

SEQ ID NO: 115310 - DNA, 26 bp, Homo sapiens
tcactccaatcactccaacttccctt

SEQ ID NO: 115311 - DNA, 26 bp, Homo sapiens
cactccaatcactccaacttccctta

SEQ ID NO: 115312 - DNA, 26 bp, Homo sapiens
actccaatcactccaacttcccttat

SEQ ID NO: 115313 - DNA, 26 bp, Homo sapiens
ctccaatcactccaacttcccttata

SEQ ID NO: 115314 - DNA, 26 bp, Homo sapiens
tccaatcactccaacttcccttataa

SEQ ID NO: 115315 - DNA, 26 bp, Homo sapiens
ccaatcactccaacttcccttataaa

SEQ ID NO: 115316 - DNA, 26 bp, Homo sapiens
caatcactccaacttcccttataaag

SEQ ID NO: 115317 - DNA, 26 bp, Homo sapiens
aatcactccaacttcccttataaaga

SEQ ID NO: 115318 - DNA, 26 bp, Homo sapiens
atcactccaacttcccttataaagat

SEQ ID NO: 115319 - DNA, 26 bp, Homo sapiens
tcactccaacttcccttataaagatg

SEQ ID NO: 115320 - DNA, 26 bp, Homo sapiens
cactccaacttcccttataaagatgt

SEQ ID NO: 115321 - DNA, 26 bp, Homo sapiens
actccaacttcccttataaagatgta

SEQ ID NO: 115322 - DNA, 26 bp, Homo sapiens
ctccaacttcccttataaagatgtag

SEQ ID NO: 115323 - DNA, 26 bp, Homo sapiens
tccaacttcccttataaagatgtagc

SEQ ID NO: 115324 - DNA, 26 bp, Homo sapiens
ccaacttcccttataaagatgtagct

SEQ ID NO: 115325 - DNA, 26 bp, Homo sapiens
caacttcccttataaagatgtagctt

SEQ ID NO: 115326 - DNA, 26 bp, Homo sapiens
aacttcccttataaagatgtagctta

SEQ ID NO: 115327 - DNA, 26 bp, Homo sapiens
acttcccttataaagatgtagcttag

SEQ ID NO: 115328 - DNA, 26 bp, Homo sapiens
cttcccttataaagatgtagcttaga

SEQ ID NO: 115329 - DNA, 26 bp, Homo sapiens
ttcccttataaagatgtagcttagag

SEQ ID NO: 115330 - DNA, 26 bp, Homo sapiens
tcccttataaagatgtagcttagagg

SEQ ID NO: 115331 - DNA, 26 bp, Homo sapiens
cccttataaagatgtagcttagagga

SEQ ID NO: 115332 - DNA, 26 bp, Homo sapiens
ccttataaagatgtagcttagaggaa

SEQ ID NO: 115333 - DNA, 26 bp, Homo sapiens
cttataaagatgtagcttagaggaaa

SEQ ID NO: 115334 - DNA, 26 bp, Homo sapiens
ttataaagatgtagcttagaggaaat

SEQ ID NO: 115335 - DNA, 26 bp, Homo sapiens
tataaagatgtagcttagaggaaatc

SEQ ID NO: 115336 - DNA, 26 bp, Homo sapiens
ataaagatgtagcttagaggaaatct

SEQ ID NO: 115337 - DNA, 26 bp, Homo sapiens
taaagatgtagcttagaggaaatctg

SEQ ID NO: 115338 - DNA, 26 bp, Homo sapiens
aaagatgtagcttagaggaaatctga

SEQ ID NO: 115339 - DNA, 26 bp, Homo sapiens
aagatgtagcttagaggaaatctgaa

SEQ ID NO: 115340 - DNA, 26 bp, Homo sapiens
agatgtagcttagaggaaatctgaaa

SEQ ID NO: 115341 - DNA, 26 bp, Homo sapiens
gatgtagcttagaggaaatctgaaat

SEQ ID NO: 115342 - DNA, 26 bp, Homo sapiens
atgtagcttagaggaaatctgaaatt

SEQ ID NO: 115343 - DNA, 26 bp, Homo sapiens
tgtagcttagaggaaatctgaaattc

SEQ ID NO: 115344 - DNA, 26 bp, Homo sapiens
gtagcttagaggaaatctgaaattca

SEQ ID NO: 115345 - DNA, 26 bp, Homo sapiens
tagcttagaggaaatctgaaattcat

SEQ ID NO: 115346 - DNA, 26 bp, Homo sapiens
agcttagaggaaatctgaaattcata

SEQ ID NO: 115347 - DNA, 26 bp, Homo sapiens
gcttagaggaaatctgaaattcatat

SEQ ID NO: 115348 - DNA, 26 bp, Homo sapiens
cttagaggaaatctgaaattcatatt

SEQ ID NO: 115349 - DNA, 26 bp, Homo sapiens
ttagaggaaatctgaaattcatattc

SEQ ID NO: 115350 - DNA, 26 bp, Homo sapiens
tagaggaaatctgaaattcatattct

SEQ ID NO: 115351 - DNA, 26 bp, Homo sapiens
agaggaaatctgaaattcatattctg

SEQ ID NO: 115352 - DNA, 26 bp, Homo sapiens
gaggaaatctgaaattcatattctgt

SEQ ID NO: 115353 - DNA, 26 bp, Homo sapiens
aggaaatctgaaattcatattctgta

SEQ ID NO: 115354 - DNA, 26 bp, Homo sapiens
ggaaatctgaaattcatattctgtaa

SEQ ID NO: 115355 - DNA, 26 bp, Homo sapiens
gaaatctgaaattcatattctgtaaa

SEQ ID NO: 115356 - DNA, 26 bp, Homo sapiens
aaatctgaaattcatattctgtaaat

SEQ ID NO: 115357 - DNA, 26 bp, Homo sapiens
aatctgaaattcatattctgtaaatg

SEQ ID NO: 115358 - DNA, 26 bp, Homo sapiens
atctgaaattcatattctgtaaatgg

SEQ ID NO: 115359 - DNA, 26 bp, Homo sapiens
tctgaaattcatattctgtaaatggt

SEQ ID NO: 115360 - DNA, 26 bp, Homo sapiens
ctgaaattcatattctgtaaatggtt

SEQ ID NO: 115361 - DNA, 26 bp, Homo sapiens
tgaaattcatattctgtaaatggttt

SEQ ID NO: 115362 - DNA, 26 bp, Homo sapiens
gaaattcatattctgtaaatggtttc

SEQ ID NO: 115363 - DNA, 26 bp, Homo sapiens
aaattcatattctgtaaatggtttca

SEQ ID NO: 115364 - DNA, 26 bp, Homo sapiens
aattcatattctgtaaatggtttcag

SEQ ID NO: 115365 - DNA, 26 bp, Homo sapiens
attcatattctgtaaatggtttcaga

SEQ ID NO: 115366 - DNA, 26 bp, Homo sapiens
ttcatattctgtaaatggtttcagat

SEQ ID NO: 115367 - DNA, 26 bp, Homo sapiens
tcatattctgtaaatggtttcagatc

SEQ ID NO: 115368 - DNA, 26 bp, Homo sapiens
catattctgtaaatggtttcagatcc

SEQ ID NO: 115369 - DNA, 26 bp, Homo sapiens
atattctgtaaatggtttcagatcca

SEQ ID NO: 115370 - DNA, 26 bp, Homo sapiens
tattctgtaaatggtttcagatccag

SEQ ID NO: 115371 - DNA, 26 bp, Homo sapiens
attctgtaaatggtttcagatccagc

SEQ ID NO: 115372 - DNA, 26 bp, Homo sapiens
ttctgtaaatggtttcagatccagca

SEQ ID NO: 115373 - DNA, 26 bp, Homo sapiens
tctgtaaatggtttcagatccagcaa

SEQ ID NO: 115374 - DNA, 26 bp, Homo sapiens
ctgtaaatggtttcagatccagcaaa

SEQ ID NO: 115375 - DNA, 26 bp, Homo sapiens
tgtaaatggtttcagatccagcaaat

SEQ ID NO: 115376 - DNA, 26 bp, Homo sapiens
gtaaatggtttcagatccagcaaatc

SEQ ID NO: 115377 - DNA, 26 bp, Homo sapiens
taaatggtttcagatccagcaaatca

SEQ ID NO: 115378 - DNA, 26 bp, Homo sapiens
aaatggtttcagatccagcaaatcat

SEQ ID NO: 115379 - DNA, 26 bp, Homo sapiens
aatggtttcagatccagcaaatcatg

SEQ ID NO: 115380 - DNA, 26 bp, Homo sapiens
atggtttcagatccagcaaatcatgt

SEQ ID NO: 115381 - DNA, 26 bp, Homo sapiens
tggtttcagatccagcaaatcatgtc

SEQ ID NO: 115382 - DNA, 26 bp, Homo sapiens
ggtttcagatccagcaaatcatgtct

SEQ ID NO: 115383 - DNA, 26 bp, Homo sapiens
gtttcagatccagcaaatcatgtctt

SEQ ID NO: 115384 - DNA, 26 bp, Homo sapiens
tttcagatccagcaaatcatgtcttc

SEQ ID NO: 115385 - DNA, 26 bp, Homo sapiens
ttcagatccagcaaatcatgtcttcc

SEQ ID NO: 115386 - DNA, 26 bp, Homo sapiens
tcagatccagcaaatcatgtcttcct

SEQ ID NO: 115387 - DNA, 26 bp, Homo sapiens
cagatccagcaaatcatgtcttcctt

SEQ ID NO: 115388 - DNA, 26 bp, Homo sapiens
agatccagcaaatcatgtcttccttt

SEQ ID NO: 115389 - DNA, 26 bp, Homo sapiens
gatccagcaaatcatgtcttcctttg

SEQ ID NO: 115390 - DNA, 26 bp, Homo sapiens
atccagcaaatcatgtcttcctttgg

SEQ ID NO: 115391 - DNA, 26 bp, Homo sapiens
tccagcaaatcatgtcttcctttggc

SEQ ID NO: 115392 - DNA, 26 bp, Homo sapiens
ccagcaaatcatgtcttcctttggcc

SEQ ID NO: 115393 - DNA, 26 bp, Homo sapiens
cagcaaatcatgtcttcctttggcct

SEQ ID NO: 115394 - DNA, 26 bp, Homo sapiens
agcaaatcatgtcttcctttggcctt

SEQ ID NO: 115395 - DNA, 26 bp, Homo sapiens
gcaaatcatgtcttcctttggccttt

SEQ ID NO: 115396 - DNA, 26 bp, Homo sapiens
caaatcatgtcttcctttggcctttg

SEQ ID NO: 115397 - DNA, 26 bp, Homo sapiens
aaatcatgtcttcctttggcctttgt

SEQ ID NO: 115398 - DNA, 26 bp, Homo sapiens
aatcatgtcttcctttggcctttgta

SEQ ID NO: 115399 - DNA, 26 bp, Homo sapiens
atcatgtcttcctttggcctttgtaa

SEQ ID NO: 115400 - DNA, 26 bp, Homo sapiens
tcatgtcttcctttggcctttgtaac

SEQ ID NO: 115401 - DNA, 26 bp, Homo sapiens
catgtcttcctttggcctttgtaaca

SEQ ID NO: 115402 - DNA, 26 bp, Homo sapiens
atgtcttcctttggcctttgtaacat

SEQ ID NO: 115403 - DNA, 26 bp, Homo sapiens
tgtcttcctttggcctttgtaacatt

SEQ ID NO: 115404 - DNA, 26 bp, Homo sapiens
gtcttcctttggcctttgtaacatta

SEQ ID NO: 115405 - DNA, 26 bp, Homo sapiens
tcttcctttggcctttgtaacattaa

SEQ ID NO: 115406 - DNA, 26 bp, Homo sapiens
cttcctttggcctttgtaacattaac

SEQ ID NO: 115407 - DNA, 26 bp, Homo sapiens
ttcctttggcctttgtaacattaacc

SEQ ID NO: 115408 - DNA, 26 bp, Homo sapiens
tcctttggcctttgtaacattaacca

SEQ ID NO: 115409 - DNA, 26 bp, Homo sapiens
cctttggcctttgtaacattaaccat

SEQ ID NO: 115410 - DNA, 26 bp, Homo sapiens
ctttggcctttgtaacattaaccata

SEQ ID NO: 115411 - DNA, 26 bp, Homo sapiens
tttggcctttgtaacattaaccatat

SEQ ID NO: 115412 - DNA, 26 bp, Homo sapiens
ttggcctttgtaacattaaccatatt

SEQ ID NO: 115413 - DNA, 26 bp, Homo sapiens
tggcctttgtaacattaaccatattc

SEQ ID NO: 115414 - DNA, 26 bp, Homo sapiens
ggcctttgtaacattaaccatattcc

SEQ ID NO: 115415 - DNA, 26 bp, Homo sapiens
gcctttgtaacattaaccatattcca

SEQ ID NO: 115416 - DNA, 26 bp, Homo sapiens
cctttgtaacattaaccatattccag

SEQ ID NO: 115417 - DNA, 26 bp, Homo sapiens
ctttgtaacattaaccatattccaga

SEQ ID NO: 115418 - DNA, 26 bp, Homo sapiens
tttgtaacattaaccatattccagag

SEQ ID NO: 115419 - DNA, 26 bp, Homo sapiens
ttgtaacattaaccatattccagagc

SEQ ID NO: 115420 - DNA, 26 bp, Homo sapiens
tgtaacattaaccatattccagagcc

SEQ ID NO: 115421 - DNA, 26 bp, Homo sapiens
gtaacattaaccatattccagagcct

SEQ ID NO: 115422 - DNA, 26 bp, Homo sapiens
taacattaaccatattccagagcctg

SEQ ID NO: 115423 - DNA, 26 bp, Homo sapiens
aacattaaccatattccagagcctgc

SEQ ID NO: 115424 - DNA, 26 bp, Homo sapiens
acattaaccatattccagagcctgct

SEQ ID NO: 115425 - DNA, 26 bp, Homo sapiens
cattaaccatattccagagcctgctg

SEQ ID NO: 115426 - DNA, 26 bp, Homo sapiens
attaaccatattccagagcctgctgt

SEQ ID NO: 115427 - DNA, 26 bp, Homo sapiens
ttaaccatattccagagcctgctgtt

SEQ ID NO: 115428 - DNA, 26 bp, Homo sapiens
taaccatattccagagcctgctgtta

SEQ ID NO: 115429 - DNA, 26 bp, Homo sapiens
aaccatattccagagcctgctgttac

SEQ ID NO: 115430 - DNA, 26 bp, Homo sapiens
accatattccagagcctgctgttact

SEQ ID NO: 115431 - DNA, 26 bp, Homo sapiens
ccatattccagagcctgctgttactg

SEQ ID NO: 115432 - DNA, 26 bp, Homo sapiens
catattccagagcctgctgttactgg

SEQ ID NO: 115433 - DNA, 26 bp, Homo sapiens
atattccagagcctgctgttactggg

SEQ ID NO: 115434 - DNA, 26 bp, Homo sapiens
tattccagagcctgctgttactgggc

SEQ ID NO: 115435 - DNA, 26 bp, Homo sapiens
attccagagcctgctgttactgggcc

SEQ ID NO: 115436 - DNA, 26 bp, Homo sapiens
ttccagagcctgctgttactgggccg

SEQ ID NO: 115437 - DNA, 26 bp, Homo sapiens
tccagagcctgctgttactgggccga

SEQ ID NO: 115438 - DNA, 26 bp, Homo sapiens
ccagagcctgctgttactgggccgat

SEQ ID NO: 115439 - DNA, 26 bp, Homo sapiens
cagagcctgctgttactgggccgata

SEQ ID NO: 115440 - DNA, 26 bp, Homo sapiens
agagcctgctgttactgggccgatat

SEQ ID NO: 115441 - DNA, 26 bp, Homo sapiens
gagcctgctgttactgggccgatatc

SEQ ID NO: 115442 - DNA, 26 bp, Homo sapiens
agcctgctgttactgggccgatatct

SEQ ID NO: 115443 - DNA, 26 bp, Homo sapiens
gcctgctgttactgggccgatatctg

SEQ ID NO: 115444 - DNA, 26 bp, Homo sapiens
cctgctgttactgggccgatatctga

SEQ ID NO: 115445 - DNA, 26 bp, Homo sapiens
ctgctgttactgggccgatatctgag

SEQ ID NO: 115446 - DNA, 26 bp, Homo sapiens
tgctgttactgggccgatatctgagt

SEQ ID NO: 115447 - DNA, 26 bp, Homo sapiens
gctgttactgggccgatatctgagtc

SEQ ID NO: 115448 - DNA, 26 bp, Homo sapiens
ctgttactgggccgatatctgagtcg

SEQ ID NO: 115449 - DNA, 26 bp, Homo sapiens
tgttactgggccgatatctgagtcga

SEQ ID NO: 115450 - DNA, 26 bp, Homo sapiens
gttactgggccgatatctgagtcgat

SEQ ID NO: 115451 - DNA, 26 bp, Homo sapiens
ttactgggccgatatctgagtcgatt

SEQ ID NO: 115452 - DNA, 26 bp, Homo sapiens
tactgggccgatatctgagtcgatta

SEQ ID NO: 115453 - DNA, 26 bp, Homo sapiens
actgggccgatatctgagtcgattaa

SEQ ID NO: 115454 - DNA, 26 bp, Homo sapiens
ctgggccgatatctgagtcgattaag

SEQ ID NO: 115455 - DNA, 26 bp, Homo sapiens
tgggccgatatctgagtcgattaagc

SEQ ID NO: 115456 - DNA, 26 bp, Homo sapiens
gggccgatatctgagtcgattaagca

SEQ ID NO: 115457 - DNA, 26 bp, Homo sapiens
ggccgatatctgagtcgattaagcag

SEQ ID NO: 115458 - DNA, 26 bp, Homo sapiens
gccgatatctgagtcgattaagcagt

SEQ ID NO: 115459 - DNA, 26 bp, Homo sapiens
ccgatatctgagtcgattaagcagta

SEQ ID NO: 115460 - DNA, 26 bp, Homo sapiens
cgatatctgagtcgattaagcagtac

SEQ ID NO: 115461 - DNA, 26 bp, Homo sapiens
gatatctgagtcgattaagcagtacc

SEQ ID NO: 115462 - DNA, 26 bp, Homo sapiens
atatctgagtcgattaagcagtacca

SEQ ID NO: 115463 - DNA, 26 bp, Homo sapiens
tatctgagtcgattaagcagtaccag

SEQ ID NO: 115464 - DNA, 26 bp, Homo sapiens
atctgagtcgattaagcagtaccagt

SEQ ID NO: 115465 - DNA, 26 bp, Homo sapiens
tctgagtcgattaagcagtaccagtc

SEQ ID NO: 115466 - DNA, 26 bp, Homo sapiens
ctgagtcgattaagcagtaccagtcc

SEQ ID NO: 115467 - DNA, 26 bp, Homo sapiens
tgagtcgattaagcagtaccagtccc

SEQ ID NO: 115468 - DNA, 26 bp, Homo sapiens
gagtcgattaagcagtaccagtccct

SEQ ID NO: 115469 - DNA, 26 bp, Homo sapiens
agtcgattaagcagtaccagtccctc

SEQ ID NO: 115470 - DNA, 26 bp, Homo sapiens
gtcgattaagcagtaccagtccctca

SEQ ID NO: 115471 - DNA, 26 bp, Homo sapiens
tcgattaagcagtaccagtccctcat

SEQ ID NO: 115472 - DNA, 26 bp, Homo sapiens
cgattaagcagtaccagtccctcatc

SEQ ID NO: 115473 - DNA, 26 bp, Homo sapiens
gattaagcagtaccagtccctcatct

SEQ ID NO: 115474 - DNA, 26 bp, Homo sapiens
attaagcagtaccagtccctcatctc

SEQ ID NO: 115475 - DNA, 26 bp, Homo sapiens
ttaagcagtaccagtccctcatctct

SEQ ID NO: 115476 - DNA, 26 bp, Homo sapiens
taagcagtaccagtccctcatctctc

SEQ ID NO: 115477 - DNA, 26 bp, Homo sapiens
aagcagtaccagtccctcatctctcc

SEQ ID NO: 115478 - DNA, 26 bp, Homo sapiens
agcagtaccagtccctcatctctcca

SEQ ID NO: 115479 - DNA, 26 bp, Homo sapiens
gcagtaccagtccctcatctctccaa

SEQ ID NO: 115480 - DNA, 26 bp, Homo sapiens
cagtaccagtccctcatctctccaat

SEQ ID NO: 115481 - DNA, 26 bp, Homo sapiens
agtaccagtccctcatctctccaata

SEQ ID NO: 115482 - DNA, 26 bp, Homo sapiens
gtaccagtccctcatctctccaataa

SEQ ID NO: 115483 - DNA, 26 bp, Homo sapiens
taccagtccctcatctctccaataaa

SEQ ID NO: 115484 - DNA, 26 bp, Homo sapiens
accagtccctcatctctccaataaag

SEQ ID NO: 115485 - DNA, 26 bp, Homo sapiens
ccagtccctcatctctccaataaagg

SEQ ID NO: 115486 - DNA, 26 bp, Homo sapiens
cagtccctcatctctccaataaaggg

SEQ ID NO: 115487 - DNA, 26 bp, Homo sapiens
agtccctcatctctccaataaagggt

SEQ ID NO: 115488 - DNA, 26 bp, Homo sapiens
gtccctcatctctccaataaagggta

SEQ ID NO: 115489 - DNA, 26 bp, Homo sapiens
tccctcatctctccaataaagggtac

SEQ ID NO: 115490 - DNA, 26 bp, Homo sapiens
ccctcatctctccaataaagggtaca

SEQ ID NO: 115491 - DNA, 26 bp, Homo sapiens
cctcatctctccaataaagggtacat

SEQ ID NO: 115492 - DNA, 26 bp, Homo sapiens
ctcatctctccaataaagggtacatc

SEQ ID NO: 115493 - DNA, 26 bp, Homo sapiens
tcatctctccaataaagggtacatct

SEQ ID NO: 115494 - DNA, 26 bp, Homo sapiens
catctctccaataaagggtacatctg

SEQ ID NO: 115495 - DNA, 26 bp, Homo sapiens
atctctccaataaagggtacatctgc

SEQ ID NO: 115496 - DNA, 26 bp, Homo sapiens
tctctccaataaagggtacatctgct

SEQ ID NO: 115497 - DNA, 26 bp, Homo sapiens
ctctccaataaagggtacatctgctc

SEQ ID NO: 115498 - DNA, 26 bp, Homo sapiens
tctccaataaagggtacatctgctca

SEQ ID NO: 115499 - DNA, 26 bp, Homo sapiens
ctccaataaagggtacatctgctcac

SEQ ID NO: 115500 - DNA, 26 bp, Homo sapiens
tccaataaagggtacatctgctcaca

SEQ ID NO: 115501 - DNA, 26 bp, Homo sapiens
ccaataaagggtacatctgctcacag

SEQ ID NO: 115502 - DNA, 26 bp, Homo sapiens
caataaagggtacatctgctcacaga

SEQ ID NO: 115503 - DNA, 26 bp, Homo sapiens
aataaagggtacatctgctcacagaa

SEQ ID NO: 115504 - DNA, 26 bp, Homo sapiens
ataaagggtacatctgctcacagaag

SEQ ID NO: 115505 - DNA, 26 bp, Homo sapiens
taaagggtacatctgctcacagaagc

SEQ ID NO: 115506 - DNA, 26 bp, Homo sapiens
aaagggtacatctgctcacagaagcc

SEQ ID NO: 115507 - DNA, 26 bp, Homo sapiens
aagggtacatctgctcacagaagcct

SEQ ID NO: 115508 - DNA, 26 bp, Homo sapiens
agggtacatctgctcacagaagcctt

SEQ ID NO: 115509 - DNA, 26 bp, Homo sapiens
gggtacatctgctcacagaagccttt

SEQ ID NO: 115510 - DNA, 26 bp, Homo sapiens
ggtacatctgctcacagaagcctttt

SEQ ID NO: 115511 - DNA, 26 bp, Homo sapiens
gtacatctgctcacagaagccttttg

SEQ ID NO: 115512 - DNA, 26 bp, Homo sapiens
tacatctgctcacagaagccttttga

SEQ ID NO: 115513 - DNA, 26 bp, Homo sapiens
acatctgctcacagaagccttttgaa

SEQ ID NO: 115514 - DNA, 26 bp, Homo sapiens
catctgctcacagaagccttttgaaa

SEQ ID NO: 115515 - DNA, 26 bp, Homo sapiens
atctgctcacagaagccttttgaaat

SEQ ID NO: 115516 - DNA, 26 bp, Homo sapiens
tctgctcacagaagccttttgaaatt

SEQ ID NO: 115517 - DNA, 26 bp, Homo sapiens
ctgctcacagaagccttttgaaattt

SEQ ID NO: 115518 - DNA, 26 bp, Homo sapiens
tgctcacagaagccttttgaaatttg

SEQ ID NO: 115519 - DNA, 26 bp, Homo sapiens
gctcacagaagccttttgaaatttga

SEQ ID NO: 115520 - DNA, 26 bp, Homo sapiens
ctcacagaagccttttgaaatttgat

SEQ ID NO: 115521 - DNA, 26 bp, Homo sapiens
tcacagaagccttttgaaatttgatt

SEQ ID NO: 115522 - DNA, 26 bp, Homo sapiens
cacagaagccttttgaaatttgattc

SEQ ID NO: 115523 - DNA, 26 bp, Homo sapiens
acagaagccttttgaaatttgattct

SEQ ID NO: 115524 - DNA, 26 bp, Homo sapiens
cagaagccttttgaaatttgattcta

SEQ ID NO: 115525 - DNA, 26 bp, Homo sapiens
agaagccttttgaaatttgattctaa

SEQ ID NO: 115526 - DNA, 26 bp, Homo sapiens
gaagccttttgaaatttgattctaat

SEQ ID NO: 115527 - DNA, 26 bp, Homo sapiens
aagccttttgaaatttgattctaatg

SEQ ID NO: 115528 - DNA, 26 bp, Homo sapiens
agccttttgaaatttgattctaatgt

SEQ ID NO: 115529 - DNA, 26 bp, Homo sapiens
gccttttgaaatttgattctaatgtc

SEQ ID NO: 115530 - DNA, 26 bp, Homo sapiens
ccttttgaaatttgattctaatgtcc

SEQ ID NO: 115531 - DNA, 26 bp, Homo sapiens
cttttgaaatttgattctaatgtccc

SEQ ID NO: 115532 - DNA, 26 bp, Homo sapiens
ttttgaaatttgattctaatgtccca

SEQ ID NO: 115533 - DNA, 26 bp, Homo sapiens
tttgaaatttgattctaatgtcccac

SEQ ID NO: 115534 - DNA, 26 bp, Homo sapiens
ttgaaatttgattctaatgtcccacg

SEQ ID NO: 115535 - DNA, 26 bp, Homo sapiens
tgaaatttgattctaatgtcccacgg

SEQ ID NO: 115536 - DNA, 26 bp, Homo sapiens
gaaatttgattctaatgtcccacgga

SEQ ID NO: 115537 - DNA, 26 bp, Homo sapiens
aaatttgattctaatgtcccacggag

SEQ ID NO: 115538 - DNA, 26 bp, Homo sapiens
aatttgattctaatgtcccacggagg

SEQ ID NO: 115539 - DNA, 26 bp, Homo sapiens
atttgattctaatgtcccacggagga

SEQ ID NO: 115540 - DNA, 26 bp, Homo sapiens
tttgattctaatgtcccacggaggaa

SEQ ID NO: 115541 - DNA, 26 bp, Homo sapiens
ttgattctaatgtcccacggaggaag

SEQ ID NO: 115542 - DNA, 26 bp, Homo sapiens
tgattctaatgtcccacggaggaaga

SEQ ID NO: 115543 - DNA, 26 bp, Homo sapiens
gattctaatgtcccacggaggaagag

SEQ ID NO: 115544 - DNA, 26 bp, Homo sapiens
attctaatgtcccacggaggaagagg

SEQ ID NO: 115545 - DNA, 26 bp, Homo sapiens
ttctaatgtcccacggaggaagaggc

SEQ ID NO: 115546 - DNA, 26 bp, Homo sapiens
tctaatgtcccacggaggaagaggcc

SEQ ID NO: 115547 - DNA, 26 bp, Homo sapiens
ctaatgtcccacggaggaagaggcct

SEQ ID NO: 115548 - DNA, 26 bp, Homo sapiens
taatgtcccacggaggaagaggcctc

SEQ ID NO: 115549 - DNA, 26 bp, Homo sapiens
aatgtcccacggaggaagaggcctca

SEQ ID NO: 115550 - DNA, 26 bp, Homo sapiens
atgtcccacggaggaagaggcctcac

SEQ ID NO: 115551 - DNA, 26 bp, Homo sapiens
tgtcccacggaggaagaggcctcact

SEQ ID NO: 115552 - DNA, 26 bp, Homo sapiens
gtcccacggaggaagaggcctcacta

SEQ ID NO: 115553 - DNA, 26 bp, Homo sapiens
tcccacggaggaagaggcctcactat

SEQ ID NO: 115554 - DNA, 26 bp, Homo sapiens
cccacggaggaagaggcctcactatg

SEQ ID NO: 115555 - DNA, 26 bp, Homo sapiens
ccacggaggaagaggcctcactatgt

SEQ ID NO: 115556 - DNA, 26 bp, Homo sapiens
cacggaggaagaggcctcactatgtc

SEQ ID NO: 115557 - DNA, 26 bp, Homo sapiens
acggaggaagaggcctcactatgtcc

SEQ ID NO: 115558 - DNA, 26 bp, Homo sapiens
cggaggaagaggcctcactatgtcca

SEQ ID NO: 115559 - DNA, 26 bp, Homo sapiens
ggaggaagaggcctcactatgtccaa

SEQ ID NO: 115560 - DNA, 26 bp, Homo sapiens
gaggaagaggcctcactatgtccaag

SEQ ID NO: 115561 - DNA, 26 bp, Homo sapiens
aggaagaggcctcactatgtccaaga

SEQ ID NO: 115562 - DNA, 26 bp, Homo sapiens
ggaagaggcctcactatgtccaagaa

SEQ ID NO: 115563 - DNA, 26 bp, Homo sapiens
gaagaggcctcactatgtccaagaat

SEQ ID NO: 115564 - DNA, 26 bp, Homo sapiens
aagaggcctcactatgtccaagaatg

SEQ ID NO: 115565 - DNA, 26 bp, Homo sapiens
agaggcctcactatgtccaagaatgt

SEQ ID NO: 115566 - DNA, 26 bp, Homo sapiens
gaggcctcactatgtccaagaatgtg

SEQ ID NO: 115567 - DNA, 26 bp, Homo sapiens
aggcctcactatgtccaagaatgtga

SEQ ID NO: 115568 - DNA, 26 bp, Homo sapiens
ggcctcactatgtccaagaatgtgaa

SEQ ID NO: 115569 - DNA, 26 bp, Homo sapiens
gcctcactatgtccaagaatgtgaat

SEQ ID NO: 115570 - DNA, 26 bp, Homo sapiens
cctcactatgtccaagaatgtgaatg

SEQ ID NO: 115571 - DNA, 26 bp, Homo sapiens
ctcactatgtccaagaatgtgaatgt

SEQ ID NO: 115572 - DNA, 26 bp, Homo sapiens
tcactatgtccaagaatgtgaatgtg

SEQ ID NO: 115573 - DNA, 26 bp, Homo sapiens
cactatgtccaagaatgtgaatgtgg

SEQ ID NO: 115574 - DNA, 26 bp, Homo sapiens
actatgtccaagaatgtgaatgtgga

SEQ ID NO: 115575 - DNA, 26 bp, Homo sapiens
ctatgtccaagaatgtgaatgtggat

SEQ ID NO: 115576 - DNA, 26 bp, Homo sapiens
tatgtccaagaatgtgaatgtggatg

SEQ ID NO: 115577 - DNA, 26 bp, Homo sapiens
atgtccaagaatgtgaatgtggatgg

SEQ ID NO: 115578 - DNA, 26 bp, Homo sapiens
tgtccaagaatgtgaatgtggatgga

SEQ ID NO: 115579 - DNA, 26 bp, Homo sapiens
gtccaagaatgtgaatgtggatggaa

SEQ ID NO: 115580 - DNA, 26 bp, Homo sapiens
tccaagaatgtgaatgtggatggaag

SEQ ID NO: 115581 - DNA, 26 bp, Homo sapiens
ccaagaatgtgaatgtggatggaagt

SEQ ID NO: 115582 - DNA, 26 bp, Homo sapiens
caagaatgtgaatgtggatggaagtg

SEQ ID NO: 115583 - DNA, 26 bp, Homo sapiens
aagaatgtgaatgtggatggaagtga

SEQ ID NO: 115584 - DNA, 26 bp, Homo sapiens
agaatgtgaatgtggatggaagtgaa

SEQ ID NO: 115585 - DNA, 26 bp, Homo sapiens
gaatgtgaatgtggatggaagtgaag

SEQ ID NO: 115586 - DNA, 26 bp, Homo sapiens
aatgtgaatgtggatggaagtgaaga

SEQ ID NO: 115587 - DNA, 26 bp, Homo sapiens
atgtgaatgtggatggaagtgaagag

SEQ ID NO: 115588 - DNA, 26 bp, Homo sapiens
tgtgaatgtggatggaagtgaagagg

SEQ ID NO: 115589 - DNA, 26 bp, Homo sapiens
gtgaatgtggatggaagtgaagagga

SEQ ID NO: 115590 - DNA, 26 bp, Homo sapiens
tgaatgtggatggaagtgaagaggag

SEQ ID NO: 115591 - DNA, 26 bp, Homo sapiens
gaatgtggatggaagtgaagaggagc

SEQ ID NO: 115592 - DNA, 26 bp, Homo sapiens
aatgtggatggaagtgaagaggagct

SEQ ID NO: 115593 - DNA, 26 bp, Homo sapiens
atgtggatggaagtgaagaggagctt

SEQ ID NO: 115594 - DNA, 26 bp, Homo sapiens
tgtggatggaagtgaagaggagcttc

SEQ ID NO: 115595 - DNA, 26 bp, Homo sapiens
gtggatggaagtgaagaggagcttcc

SEQ ID NO: 115596 - DNA, 26 bp, Homo sapiens
tggatggaagtgaagaggagcttcca

SEQ ID NO: 115597 - DNA, 26 bp, Homo sapiens
ggatggaagtgaagaggagcttccaa

SEQ ID NO: 115598 - DNA, 26 bp, Homo sapiens
gatggaagtgaagaggagcttccaag

SEQ ID NO: 115599 - DNA, 26 bp, Homo sapiens
atggaagtgaagaggagcttccaaga

SEQ ID NO: 115600 - DNA, 26 bp, Homo sapiens
tggaagtgaagaggagcttccaagac

SEQ ID NO: 115601 - DNA, 26 bp, Homo sapiens
ggaagtgaagaggagcttccaagact

SEQ ID NO: 115602 - DNA, 26 bp, Homo sapiens
gaagtgaagaggagcttccaagacta

SEQ ID NO: 115603 - DNA, 26 bp, Homo sapiens
aagtgaagaggagcttccaagactat

SEQ ID NO: 115604 - DNA, 26 bp, Homo sapiens
agtgaagaggagcttccaagactatt

SEQ ID NO: 115605 - DNA, 26 bp, Homo sapiens
gtgaagaggagcttccaagactattg

SEQ ID NO: 115606 - DNA, 26 bp, Homo sapiens
tgaagaggagcttccaagactattga

SEQ ID NO: 115607 - DNA, 26 bp, Homo sapiens
gaagaggagcttccaagactattgac

SEQ ID NO: 115608 - DNA, 26 bp, Homo sapiens
aagaggagcttccaagactattgaca

SEQ ID NO: 115609 - DNA, 26 bp, Homo sapiens
agaggagcttccaagactattgacag

SEQ ID NO: 115610 - DNA, 26 bp, Homo sapiens
gaggagcttccaagactattgacagc

SEQ ID NO: 115611 - DNA, 26 bp, Homo sapiens
aggagcttccaagactattgacagca

SEQ ID NO: 115612 - DNA, 26 bp, Homo sapiens
ggagcttccaagactattgacagcag

SEQ ID NO: 115613 - DNA, 26 bp, Homo sapiens
gagcttccaagactattgacagcagt

SEQ ID NO: 115614 - DNA, 26 bp, Homo sapiens
agcttccaagactattgacagcagta

SEQ ID NO: 115615 - DNA, 26 bp, Homo sapiens
gcttccaagactattgacagcagtaa

SEQ ID NO: 115616 - DNA, 26 bp, Homo sapiens
cttccaagactattgacagcagtaac

SEQ ID NO: 115617 - DNA, 26 bp, Homo sapiens
ttccaagactattgacagcagtaacc

SEQ ID NO: 115618 - DNA, 26 bp, Homo sapiens
tccaagactattgacagcagtaacct

SEQ ID NO: 115619 - DNA, 26 bp, Homo sapiens
ccaagactattgacagcagtaacctt

SEQ ID NO: 115620 - DNA, 26 bp, Homo sapiens
caagactattgacagcagtaaccttg

SEQ ID NO: 115621 - DNA, 26 bp, Homo sapiens
aagactattgacagcagtaaccttgg

SEQ ID NO: 115622 - DNA, 26 bp, Homo sapiens
agactattgacagcagtaaccttggc

SEQ ID NO: 115623 - DNA, 26 bp, Homo sapiens
gactattgacagcagtaaccttggct

SEQ ID NO: 115624 - DNA, 26 bp, Homo sapiens
actattgacagcagtaaccttggctg

SEQ ID NO: 115625 - DNA, 26 bp, Homo sapiens
ctattgacagcagtaaccttggctgt

SEQ ID NO: 115626 - DNA, 26 bp, Homo sapiens
tattgacagcagtaaccttggctgtg

SEQ ID NO: 115627 - DNA, 26 bp, Homo sapiens
attgacagcagtaaccttggctgtga

SEQ ID NO: 115628 - DNA, 26 bp, Homo sapiens
ttgacagcagtaaccttggctgtgaa

SEQ ID NO: 115629 - DNA, 26 bp, Homo sapiens
tgacagcagtaaccttggctgtgaaa

SEQ ID NO: 115630 - DNA, 26 bp, Homo sapiens
gacagcagtaaccttggctgtgaaat

SEQ ID NO: 115631 - DNA, 26 bp, Homo sapiens
acagcagtaaccttggctgtgaaatt

SEQ ID NO: 115632 - DNA, 26 bp, Homo sapiens
cagcagtaaccttggctgtgaaattg

SEQ ID NO: 115633 - DNA, 26 bp, Homo sapiens
agcagtaaccttggctgtgaaattgg

SEQ ID NO: 115634 - DNA, 26 bp, Homo sapiens
gcagtaaccttggctgtgaaattgga

SEQ ID NO: 115635 - DNA, 26 bp, Homo sapiens
cagtaaccttggctgtgaaattggat

SEQ ID NO: 115636 - DNA, 26 bp, Homo sapiens
agtaaccttggctgtgaaattggatt

SEQ ID NO: 115637 - DNA, 26 bp, Homo sapiens
gtaaccttggctgtgaaattggattc

SEQ ID NO: 115638 - DNA, 26 bp, Homo sapiens
taaccttggctgtgaaattggattca

SEQ ID NO: 115639 - DNA, 26 bp, Homo sapiens
aaccttggctgtgaaattggattcag

SEQ ID NO: 115640 - DNA, 26 bp, Homo sapiens
accttggctgtgaaattggattcagg

SEQ ID NO: 115641 - DNA, 26 bp, Homo sapiens
ccttggctgtgaaattggattcaggt

SEQ ID NO: 115642 - DNA, 26 bp, Homo sapiens
cttggctgtgaaattggattcaggtg

SEQ ID NO: 115643 - DNA, 26 bp, Homo sapiens
ttggctgtgaaattggattcaggtga

SEQ ID NO: 115644 - DNA, 26 bp, Homo sapiens
tggctgtgaaattggattcaggtgat

SEQ ID NO: 115645 - DNA, 26 bp, Homo sapiens
ggctgtgaaattggattcaggtgatt

SEQ ID NO: 115646 - DNA, 26 bp, Homo sapiens
gctgtgaaattggattcaggtgattc

SEQ ID NO: 115647 - DNA, 26 bp, Homo sapiens
ctgtgaaattggattcaggtgattca

SEQ ID NO: 115648 - DNA, 26 bp, Homo sapiens
tgtgaaattggattcaggtgattcag

SEQ ID NO: 115649 - DNA, 26 bp, Homo sapiens
gtgaaattggattcaggtgattcagg

SEQ ID NO: 115650 - DNA, 26 bp, Homo sapiens
tgaaattggattcaggtgattcaggg

SEQ ID NO: 115651 - DNA, 26 bp, Homo sapiens
gaaattggattcaggtgattcagggg

SEQ ID NO: 115652 - DNA, 26 bp, Homo sapiens
aaattggattcaggtgattcaggggt

SEQ ID NO: 115653 - DNA, 26 bp, Homo sapiens
aattggattcaggtgattcaggggtg

SEQ ID NO: 115654 - DNA, 26 bp, Homo sapiens
attggattcaggtgattcaggggtga

SEQ ID NO: 115655 - DNA, 26 bp, Homo sapiens
ttggattcaggtgattcaggggtgag

SEQ ID NO: 115656 - DNA, 26 bp, Homo sapiens
tggattcaggtgattcaggggtgagg

SEQ ID NO: 115657 - DNA, 26 bp, Homo sapiens
ggattcaggtgattcaggggtgaggt

SEQ ID NO: 115658 - DNA, 26 bp, Homo sapiens
gattcaggtgattcaggggtgaggtt

SEQ ID NO: 115659 - DNA, 26 bp, Homo sapiens
attcaggtgattcaggggtgaggttg

SEQ ID NO: 115660 - DNA, 26 bp, Homo sapiens
ttcaggtgattcaggggtgaggttga

SEQ ID NO: 115661 - DNA, 26 bp, Homo sapiens
tcaggtgattcaggggtgaggttgat

SEQ ID NO: 115662 - DNA, 26 bp, Homo sapiens
caggtgattcaggggtgaggttgatt

SEQ ID NO: 115663 - DNA, 26 bp, Homo sapiens
aggtgattcaggggtgaggttgattc

SEQ ID NO: 115664 - DNA, 26 bp, Homo sapiens
ggtgattcaggggtgaggttgattcc

SEQ ID NO: 115665 - DNA, 26 bp, Homo sapiens
gtgattcaggggtgaggttgattcca

SEQ ID NO: 115666 - DNA, 26 bp, Homo sapiens
tgattcaggggtgaggttgattccaa

SEQ ID NO: 115667 - DNA, 26 bp, Homo sapiens
gattcaggggtgaggttgattccaaa

SEQ ID NO: 115668 - DNA, 26 bp, Homo sapiens
attcaggggtgaggttgattccaaag

SEQ ID NO: 115669 - DNA, 26 bp, Homo sapiens
ttcaggggtgaggttgattccaaagt

SEQ ID NO: 115670 - DNA, 26 bp, Homo sapiens
tcaggggtgaggttgattccaaagtc

SEQ ID NO: 115671 - DNA, 26 bp, Homo sapiens
caggggtgaggttgattccaaagtcc

SEQ ID NO: 115672 - DNA, 26 bp, Homo sapiens
aggggtgaggttgattccaaagtcca

SEQ ID NO: 115673 - DNA, 26 bp, Homo sapiens
ggggtgaggttgattccaaagtccaa

SEQ ID NO: 115674 - DNA, 26 bp, Homo sapiens
gggtgaggttgattccaaagtccaaa

SEQ ID NO: 115675 - DNA, 26 bp, Homo sapiens
ggtgaggttgattccaaagtccaaat

SEQ ID NO: 115676 - DNA, 26 bp, Homo sapiens
gtgaggttgattccaaagtccaaata

SEQ ID NO: 115677 - DNA, 26 bp, Homo sapiens
tgaggttgattccaaagtccaaatag

SEQ ID NO: 115678 - DNA, 26 bp, Homo sapiens
gaggttgattccaaagtccaaatagt

SEQ ID NO: 115679 - DNA, 26 bp, Homo sapiens
aggttgattccaaagtccaaatagtc

SEQ ID NO: 115680 - DNA, 26 bp, Homo sapiens
ggttgattccaaagtccaaatagtca

SEQ ID NO: 115681 - DNA, 26 bp, Homo sapiens
gttgattccaaagtccaaatagtcac

SEQ ID NO: 115682 - DNA, 26 bp, Homo sapiens
ttgattccaaagtccaaatagtcaca

SEQ ID NO: 115683 - DNA, 26 bp, Homo sapiens
tgattccaaagtccaaatagtcacaa

SEQ ID NO: 115684 - DNA, 26 bp, Homo sapiens
gattccaaagtccaaatagtcacaat

SEQ ID NO: 115685 - DNA, 26 bp, Homo sapiens
attccaaagtccaaatagtcacaata

SEQ ID NO: 115686 - DNA, 26 bp, Homo sapiens
ttccaaagtccaaatagtcacaataa

SEQ ID NO: 115687 - DNA, 26 bp, Homo sapiens
tccaaagtccaaatagtcacaataaa

SEQ ID NO: 115688 - DNA, 26 bp, Homo sapiens
ccaaagtccaaatagtcacaataaat

SEQ ID NO: 115689 - DNA, 26 bp, Homo sapiens
caaagtccaaatagtcacaataaatg

SEQ ID NO: 115690 - DNA, 26 bp, Homo sapiens
aaagtccaaatagtcacaataaatgt

SEQ ID NO: 115691 - DNA, 26 bp, Homo sapiens
aagtccaaatagtcacaataaatgtc

SEQ ID NO: 115692 - DNA, 26 bp, Homo sapiens
agtccaaatagtcacaataaatgtct

SEQ ID NO: 115693 - DNA, 26 bp, Homo sapiens
gtccaaatagtcacaataaatgtctt

SEQ ID NO: 115694 - DNA, 26 bp, Homo sapiens
tccaaatagtcacaataaatgtcttt

SEQ ID NO: 115695 - DNA, 26 bp, Homo sapiens
ccaaatagtcacaataaatgtcttta

SEQ ID NO: 115696 - DNA, 26 bp, Homo sapiens
caaatagtcacaataaatgtctttac

SEQ ID NO: 115697 - DNA, 26 bp, Homo sapiens
aaatagtcacaataaatgtctttaca

SEQ ID NO: 115698 - DNA, 26 bp, Homo sapiens
aatagtcacaataaatgtctttacat

SEQ ID NO: 115699 - DNA, 26 bp, Homo sapiens
atagtcacaataaatgtctttacatt

SEQ ID NO: 115700 - DNA, 26 bp, Homo sapiens
tagtcacaataaatgtctttacattg

SEQ ID NO: 115701 - DNA, 26 bp, Homo sapiens
agtcacaataaatgtctttacattgc

SEQ ID NO: 115702 - DNA, 26 bp, Homo sapiens
gtcacaataaatgtctttacattgct

SEQ ID NO: 115703 - DNA, 26 bp, Homo sapiens
tcacaataaatgtctttacattgctt

SEQ ID NO: 115704 - DNA, 26 bp, Homo sapiens
cacaataaatgtctttacattgcttc

SEQ ID NO: 115705 - DNA, 26 bp, Homo sapiens
acaataaatgtctttacattgcttct

SEQ ID NO: 115706 - DNA, 26 bp, Homo sapiens
caataaatgtctttacattgcttctg

SEQ ID NO: 115707 - DNA, 26 bp, Homo sapiens
aataaatgtctttacattgcttctgc

SEQ ID NO: 115708 - DNA, 26 bp, Homo sapiens
ataaatgtctttacattgcttctgcc

SEQ ID NO: 115709 - DNA, 26 bp, Homo sapiens
taaatgtctttacattgcttctgcca

SEQ ID NO: 115710 - DNA, 26 bp, Homo sapiens
aaatgtctttacattgcttctgccag

SEQ ID NO: 115711 - DNA, 26 bp, Homo sapiens
aatgtctttacattgcttctgccagg

SEQ ID NO: 115712 - DNA, 26 bp, Homo sapiens
atgtctttacattgcttctgccaggt

SEQ ID NO: 115713 - DNA, 26 bp, Homo sapiens
tgtctttacattgcttctgccaggtt

SEQ ID NO: 115714 - DNA, 26 bp, Homo sapiens
gtctttacattgcttctgccaggtta

SEQ ID NO: 115715 - DNA, 26 bp, Homo sapiens
tctttacattgcttctgccaggttaa

SEQ ID NO: 115716 - DNA, 26 bp, Homo sapiens
ctttacattgcttctgccaggttaaa

SEQ ID NO: 115717 - DNA, 26 bp, Homo sapiens
tttacattgcttctgccaggttaaat

SEQ ID NO: 115718 - DNA, 26 bp, Homo sapiens
ttacattgcttctgccaggttaaatt

SEQ ID NO: 115719 - DNA, 26 bp, Homo sapiens
tacattgcttctgccaggttaaattt

SEQ ID NO: 115720 - DNA, 26 bp, Homo sapiens
acattgcttctgccaggttaaatttt

SEQ ID NO: 115721 - DNA, 26 bp, Homo sapiens
cattgcttctgccaggttaaattttt

SEQ ID NO: 115722 - DNA, 26 bp, Homo sapiens
attgcttctgccaggttaaatttttt

SEQ ID NO: 115723 - DNA, 26 bp, Homo sapiens
ttgcttctgccaggttaaattttttg

SEQ ID NO: 115724 - DNA, 26 bp, Homo sapiens
tgcttctgccaggttaaattttttgg

SEQ ID NO: 115725 - DNA, 26 bp, Homo sapiens
gcttctgccaggttaaattttttggt

SEQ ID NO: 115726 - DNA, 26 bp, Homo sapiens
cttctgccaggttaaattttttggtc

SEQ ID NO: 115727 - DNA, 26 bp, Homo sapiens
ttctgccaggttaaattttttggtcc

SEQ ID NO: 115728 - DNA, 26 bp, Homo sapiens
tctgccaggttaaattttttggtcca

SEQ ID NO: 115729 - DNA, 26 bp, Homo sapiens
ctgccaggttaaattttttggtccac

SEQ ID NO: 115730 - DNA, 26 bp, Homo sapiens
tgccaggttaaattttttggtccact

SEQ ID NO: 115731 - DNA, 26 bp, Homo sapiens
gccaggttaaattttttggtccactt

SEQ ID NO: 115732 - DNA, 26 bp, Homo sapiens
ccaggttaaattttttggtccactta

SEQ ID NO: 115733 - DNA, 26 bp, Homo sapiens
caggttaaattttttggtccacttag

SEQ ID NO: 115734 - DNA, 26 bp, Homo sapiens
aggttaaattttttggtccacttagc

SEQ ID NO: 115735 - DNA, 26 bp, Homo sapiens
ggttaaattttttggtccacttagct

SEQ ID NO: 115736 - DNA, 26 bp, Homo sapiens
gttaaattttttggtccacttagctg

SEQ ID NO: 115737 - DNA, 26 bp, Homo sapiens
ttaaattttttggtccacttagctgt

SEQ ID NO: 115738 - DNA, 26 bp, Homo sapiens
taaattttttggtccacttagctgta

SEQ ID NO: 115739 - DNA, 26 bp, Homo sapiens
aaattttttggtccacttagctgtag

SEQ ID NO: 115740 - DNA, 26 bp, Homo sapiens
aattttttggtccacttagctgtaga

SEQ ID NO: 115741 - DNA, 26 bp, Homo sapiens
attttttggtccacttagctgtagag

SEQ ID NO: 115742 - DNA, 26 bp, Homo sapiens
ttttttggtccacttagctgtagagt

SEQ ID NO: 115743 - DNA, 26 bp, Homo sapiens
tttttggtccacttagctgtagagta

SEQ ID NO: 115744 - DNA, 26 bp, Homo sapiens
ttttggtccacttagctgtagagtat

SEQ ID NO: 115745 - DNA, 26 bp, Homo sapiens
tttggtccacttagctgtagagtata

SEQ ID NO: 115746 - DNA, 26 bp, Homo sapiens
ttggtccacttagctgtagagtatac

SEQ ID NO: 115747 - DNA, 26 bp, Homo sapiens
tggtccacttagctgtagagtatact

SEQ ID NO: 115748 - DNA, 26 bp, Homo sapiens
ggtccacttagctgtagagtatactc

SEQ ID NO: 115749 - DNA, 26 bp, Homo sapiens
gtccacttagctgtagagtatactca

SEQ ID NO: 115750 - DNA, 26 bp, Homo sapiens
tccacttagctgtagagtatactcag

SEQ ID NO: 115751 - DNA, 26 bp, Homo sapiens
ccacttagctgtagagtatactcagt

SEQ ID NO: 115752 - DNA, 26 bp, Homo sapiens
cacttagctgtagagtatactcagtg

SEQ ID NO: 115753 - DNA, 26 bp, Homo sapiens
acttagctgtagagtatactcagtgt

SEQ ID NO: 115754 - DNA, 26 bp, Homo sapiens
cttagctgtagagtatactcagtgta

SEQ ID NO: 115755 - DNA, 26 bp, Homo sapiens
ttagctgtagagtatactcagtgtat

SEQ ID NO: 115756 - DNA, 26 bp, Homo sapiens
tagctgtagagtatactcagtgtata

SEQ ID NO: 115757 - DNA, 26 bp, Homo sapiens
agctgtagagtatactcagtgtataa

SEQ ID NO: 115758 - DNA, 26 bp, Homo sapiens
gctgtagagtatactcagtgtataag

SEQ ID NO: 115759 - DNA, 26 bp, Homo sapiens
ctgtagagtatactcagtgtataagt

SEQ ID NO: 115760 - DNA, 26 bp, Homo sapiens
tgtagagtatactcagtgtataagtg

SEQ ID NO: 115761 - DNA, 26 bp, Homo sapiens
gtagagtatactcagtgtataagtgg

SEQ ID NO: 115762 - DNA, 26 bp, Homo sapiens
tagagtatactcagtgtataagtggg

SEQ ID NO: 115763 - DNA, 26 bp, Homo sapiens
agagtatactcagtgtataagtgggt

SEQ ID NO: 115764 - DNA, 26 bp, Homo sapiens
gagtatactcagtgtataagtgggtg

SEQ ID NO: 115765 - DNA, 26 bp, Homo sapiens
agtatactcagtgtataagtgggtgt

SEQ ID NO: 115766 - DNA, 26 bp, Homo sapiens
gtatactcagtgtataagtgggtgtc

SEQ ID NO: 115767 - DNA, 26 bp, Homo sapiens
tatactcagtgtataagtgggtgtct

SEQ ID NO: 115768 - DNA, 26 bp, Homo sapiens
atactcagtgtataagtgggtgtctc

SEQ ID NO: 115769 - DNA, 26 bp, Homo sapiens
tactcagtgtataagtgggtgtctcg

SEQ ID NO: 115770 - DNA, 26 bp, Homo sapiens
actcagtgtataagtgggtgtctcgt

SEQ ID NO: 115771 - DNA, 26 bp, Homo sapiens
ctcagtgtataagtgggtgtctcgtc

SEQ ID NO: 115772 - DNA, 26 bp, Homo sapiens
tcagtgtataagtgggtgtctcgtcc

SEQ ID NO: 115773 - DNA, 26 bp, Homo sapiens
cagtgtataagtgggtgtctcgtcct

SEQ ID NO: 115774 - DNA, 26 bp, Homo sapiens
agtgtataagtgggtgtctcgtcctc

SEQ ID NO: 115775 - DNA, 26 bp, Homo sapiens
gtgtataagtgggtgtctcgtcctct

SEQ ID NO: 115776 - DNA, 26 bp, Homo sapiens
tgtataagtgggtgtctcgtcctctt

SEQ ID NO: 115777 - DNA, 26 bp, Homo sapiens
gtataagtgggtgtctcgtcctcttt

SEQ ID NO: 115778 - DNA, 26 bp, Homo sapiens
tataagtgggtgtctcgtcctctttc

SEQ ID NO: 115779 - DNA, 26 bp, Homo sapiens
ataagtgggtgtctcgtcctctttcc

SEQ ID NO: 115780 - DNA, 26 bp, Homo sapiens
taagtgggtgtctcgtcctctttccc

SEQ ID NO: 115781 - DNA, 26 bp, Homo sapiens
aagtgggtgtctcgtcctctttccca

SEQ ID NO: 115782 - DNA, 26 bp, Homo sapiens
agtgggtgtctcgtcctctttcccag

SEQ ID NO: 115783 - DNA, 26 bp, Homo sapiens
gtgggtgtctcgtcctctttcccagg

SEQ ID NO: 115784 - DNA, 26 bp, Homo sapiens
tgggtgtctcgtcctctttcccaggt

SEQ ID NO: 115785 - DNA, 26 bp, Homo sapiens
gggtgtctcgtcctctttcccaggtg

SEQ ID NO: 115786 - DNA, 26 bp, Homo sapiens
ggtgtctcgtcctctttcccaggtgc

SEQ ID NO: 115787 - DNA, 26 bp, Homo sapiens
gtgtctcgtcctctttcccaggtgca

SEQ ID NO: 115788 - DNA, 26 bp, Homo sapiens
tgtctcgtcctctttcccaggtgcag

SEQ ID NO: 115789 - DNA, 26 bp, Homo sapiens
gtctcgtcctctttcccaggtgcagg

SEQ ID NO: 115790 - DNA, 26 bp, Homo sapiens
tctcgtcctctttcccaggtgcaggc

SEQ ID NO: 115791 - DNA, 26 bp, Homo sapiens
ctcgtcctctttcccaggtgcaggcc

SEQ ID NO: 115792 - DNA, 26 bp, Homo sapiens
tcgtcctctttcccaggtgcaggcca

SEQ ID NO: 115793 - DNA, 26 bp, Homo sapiens
cgtcctctttcccaggtgcaggccac

SEQ ID NO: 115794 - DNA, 26 bp, Homo sapiens
gtcctctttcccaggtgcaggccaca

SEQ ID NO: 115795 - DNA, 26 bp, Homo sapiens
tcctctttcccaggtgcaggccacag

SEQ ID NO: 115796 - DNA, 26 bp, Homo sapiens
cctctttcccaggtgcaggccacagt

SEQ ID NO: 115797 - DNA, 26 bp, Homo sapiens
ctctttcccaggtgcaggccacagtc

SEQ ID NO: 115798 - DNA, 26 bp, Homo sapiens
tctttcccaggtgcaggccacagtcc

SEQ ID NO: 115799 - DNA, 26 bp, Homo sapiens
ctttcccaggtgcaggccacagtccc

SEQ ID NO: 115800 - DNA, 26 bp, Homo sapiens
tttcccaggtgcaggccacagtcccc

SEQ ID NO: 115801 - DNA, 26 bp, Homo sapiens
ttcccaggtgcaggccacagtcccct

SEQ ID NO: 115802 - DNA, 26 bp, Homo sapiens
tcccaggtgcaggccacagtcccctg

SEQ ID NO: 115803 - DNA, 26 bp, Homo sapiens
cccaggtgcaggccacagtcccctgt

SEQ ID NO: 115804 - DNA, 26 bp, Homo sapiens
ccaggtgcaggccacagtcccctgtt

SEQ ID NO: 115805 - DNA, 26 bp, Homo sapiens
caggtgcaggccacagtcccctgttc

SEQ ID NO: 115806 - DNA, 26 bp, Homo sapiens
aggtgcaggccacagtcccctgttct

SEQ ID NO: 115807 - DNA, 26 bp, Homo sapiens
ggtgcaggccacagtcccctgttctc

SEQ ID NO: 115808 - DNA, 26 bp, Homo sapiens
gtgcaggccacagtcccctgttctcc

SEQ ID NO: 115809 - DNA, 26 bp, Homo sapiens
tgcaggccacagtcccctgttctccc

SEQ ID NO: 115810 - DNA, 26 bp, Homo sapiens
gcaggccacagtcccctgttctccct

SEQ ID NO: 115811 - DNA, 26 bp, Homo sapiens
caggccacagtcccctgttctccctt

SEQ ID NO: 115812 - DNA, 26 bp, Homo sapiens
aggccacagtcccctgttctcccttc

SEQ ID NO: 115813 - DNA, 26 bp, Homo sapiens
ggccacagtcccctgttctcccttct

SEQ ID NO: 115814 - DNA, 26 bp, Homo sapiens
gccacagtcccctgttctcccttctg

SEQ ID NO: 115815 - DNA, 26 bp, Homo sapiens
ccacagtcccctgttctcccttctgt

SEQ ID NO: 115816 - DNA, 26 bp, Homo sapiens
cacagtcccctgttctcccttctgta

SEQ ID NO: 115817 - DNA, 26 bp, Homo sapiens
acagtcccctgttctcccttctgtat

SEQ ID NO: 115818 - DNA, 26 bp, Homo sapiens
cagtcccctgttctcccttctgtatg

SEQ ID NO: 115819 - DNA, 26 bp, Homo sapiens
agtcccctgttctcccttctgtatgc

SEQ ID NO: 115820 - DNA, 26 bp, Homo sapiens
gtcccctgttctcccttctgtatgca

SEQ ID NO: 115821 - DNA, 26 bp, Homo sapiens
tcccctgttctcccttctgtatgcag

SEQ ID NO: 115822 - DNA, 26 bp, Homo sapiens
cccctgttctcccttctgtatgcagg

SEQ ID NO: 115823 - DNA, 26 bp, Homo sapiens
ccctgttctcccttctgtatgcagga

SEQ ID NO: 115824 - DNA, 26 bp, Homo sapiens
cctgttctcccttctgtatgcaggat

SEQ ID NO: 115825 - DNA, 26 bp, Homo sapiens
ctgttctcccttctgtatgcaggata

SEQ ID NO: 115826 - DNA, 26 bp, Homo sapiens
tgttctcccttctgtatgcaggataa

SEQ ID NO: 115827 - DNA, 26 bp, Homo sapiens
gttctcccttctgtatgcaggataaa

SEQ ID NO: 115828 - DNA, 26 bp, Homo sapiens
ttctcccttctgtatgcaggataaat

SEQ ID NO: 115829 - DNA, 26 bp, Homo sapiens
tctcccttctgtatgcaggataaatt

SEQ ID NO: 115830 - DNA, 26 bp, Homo sapiens
ctcccttctgtatgcaggataaattt

SEQ ID NO: 115831 - DNA, 26 bp, Homo sapiens
tcccttctgtatgcaggataaatttt

SEQ ID NO: 115832 - DNA, 26 bp, Homo sapiens
cccttctgtatgcaggataaattttg

SEQ ID NO: 115833 - DNA, 26 bp, Homo sapiens
ccttctgtatgcaggataaattttga

SEQ ID NO: 115834 - DNA, 26 bp, Homo sapiens
cttctgtatgcaggataaattttgag

SEQ ID NO: 115835 - DNA, 26 bp, Homo sapiens
ttctgtatgcaggataaattttgagg

SEQ ID NO: 115836 - DNA, 26 bp, Homo sapiens
tctgtatgcaggataaattttgaggc

SEQ ID NO: 115837 - DNA, 26 bp, Homo sapiens
ctgtatgcaggataaattttgaggct

SEQ ID NO: 115838 - DNA, 26 bp, Homo sapiens
tgtatgcaggataaattttgaggctg

SEQ ID NO: 115839 - DNA, 26 bp, Homo sapiens
gtatgcaggataaattttgaggctgt

SEQ ID NO: 115840 - DNA, 26 bp, Homo sapiens
tatgcaggataaattttgaggctgtt

SEQ ID NO: 115841 - DNA, 26 bp, Homo sapiens
atgcaggataaattttgaggctgttc

SEQ ID NO: 115842 - DNA, 26 bp, Homo sapiens
tgcaggataaattttgaggctgttct

SEQ ID NO: 115843 - DNA, 26 bp, Homo sapiens
gcaggataaattttgaggctgttctg

SEQ ID NO: 115844 - DNA, 26 bp, Homo sapiens
caggataaattttgaggctgttctgg

SEQ ID NO: 115845 - DNA, 26 bp, Homo sapiens
aggataaattttgaggctgttctgga

SEQ ID NO: 115846 - DNA, 26 bp, Homo sapiens
ggataaattttgaggctgttctggag

SEQ ID NO: 115847 - DNA, 26 bp, Homo sapiens
gataaattttgaggctgttctggagc

SEQ ID NO: 115848 - DNA, 26 bp, Homo sapiens
ataaattttgaggctgttctggagca

SEQ ID NO: 115849 - DNA, 26 bp, Homo sapiens
taaattttgaggctgttctggagcaa

SEQ ID NO: 115850 - DNA, 26 bp, Homo sapiens
aaattttgaggctgttctggagcaac

SEQ ID NO: 115851 - DNA, 26 bp, Homo sapiens
aattttgaggctgttctggagcaaca

SEQ ID NO: 115852 - DNA, 26 bp, Homo sapiens
attttgaggctgttctggagcaacac

SEQ ID NO: 115853 - DNA, 26 bp, Homo sapiens
ttttgaggctgttctggagcaacacc

SEQ ID NO: 115854 - DNA, 26 bp, Homo sapiens
tttgaggctgttctggagcaacacca

SEQ ID NO: 115855 - DNA, 26 bp, Homo sapiens
ttgaggctgttctggagcaacaccaa

SEQ ID NO: 115856 - DNA, 26 bp, Homo sapiens
tgaggctgttctggagcaacaccaac

SEQ ID NO: 115857 - DNA, 26 bp, Homo sapiens
gaggctgttctggagcaacaccaacg

SEQ ID NO: 115858 - DNA, 26 bp, Homo sapiens
aggctgttctggagcaacaccaacga

SEQ ID NO: 115859 - DNA, 26 bp, Homo sapiens
ggctgttctggagcaacaccaacgaa

SEQ ID NO: 115860 - DNA, 26 bp, Homo sapiens
gctgttctggagcaacaccaacgaag

SEQ ID NO: 115861 - DNA, 26 bp, Homo sapiens
ctgttctggagcaacaccaacgaaga

SEQ ID NO: 115862 - DNA, 26 bp, Homo sapiens
tgttctggagcaacaccaacgaagat

SEQ ID NO: 115863 - DNA, 26 bp, Homo sapiens
gttctggagcaacaccaacgaagatc

SEQ ID NO: 115864 - DNA, 26 bp, Homo sapiens
ttctggagcaacaccaacgaagatct

SEQ ID NO: 115865 - DNA, 26 bp, Homo sapiens
tctggagcaacaccaacgaagatctc

SEQ ID NO: 115866 - DNA, 26 bp, Homo sapiens
ctggagcaacaccaacgaagatctct

SEQ ID NO: 115867 - DNA, 26 bp, Homo sapiens
tggagcaacaccaacgaagatctctg

SEQ ID NO: 115868 - DNA, 26 bp, Homo sapiens
ggagcaacaccaacgaagatctctgc

SEQ ID NO: 115869 - DNA, 26 bp, Homo sapiens
gagcaacaccaacgaagatctctgct

SEQ ID NO: 115870 - DNA, 26 bp, Homo sapiens
agcaacaccaacgaagatctctgctc

SEQ ID NO: 115871 - DNA, 26 bp, Homo sapiens
gcaacaccaacgaagatctctgctcc

SEQ ID NO: 115872 - DNA, 26 bp, Homo sapiens
caacaccaacgaagatctctgctcca

SEQ ID NO: 115873 - DNA, 26 bp, Homo sapiens
aacaccaacgaagatctctgctccac

SEQ ID NO: 115874 - DNA, 26 bp, Homo sapiens
acaccaacgaagatctctgctccaca

SEQ ID NO: 115875 - DNA, 26 bp, Homo sapiens
caccaacgaagatctctgctccacat

SEQ ID NO: 115876 - DNA, 26 bp, Homo sapiens
accaacgaagatctctgctccacata

SEQ ID NO: 115877 - DNA, 26 bp, Homo sapiens
ccaacgaagatctctgctccacatat

SEQ ID NO: 115878 - DNA, 26 bp, Homo sapiens
caacgaagatctctgctccacatatt

SEQ ID NO: 115879 - DNA, 26 bp, Homo sapiens
aacgaagatctctgctccacatattt

SEQ ID NO: 115880 - DNA, 26 bp, Homo sapiens
acgaagatctctgctccacatatttg

SEQ ID NO: 115881 - DNA, 26 bp, Homo sapiens
cgaagatctctgctccacatatttga

SEQ ID NO: 115882 - DNA, 26 bp, Homo sapiens
gaagatctctgctccacatatttgaa

SEQ ID NO: 115883 - DNA, 26 bp, Homo sapiens
aagatctctgctccacatatttgaat

SEQ ID NO: 115884 - DNA, 26 bp, Homo sapiens
agatctctgctccacatatttgaatt

SEQ ID NO: 115885 - DNA, 26 bp, Homo sapiens
gatctctgctccacatatttgaattt

SEQ ID NO: 115886 - DNA, 26 bp, Homo sapiens
atctctgctccacatatttgaatttc

SEQ ID NO: 115887 - DNA, 26 bp, Homo sapiens
tctctgctccacatatttgaatttca

SEQ ID NO: 115888 - DNA, 26 bp, Homo sapiens
ctctgctccacatatttgaatttcat

SEQ ID NO: 115889 - DNA, 26 bp, Homo sapiens
tctgctccacatatttgaatttcatc

SEQ ID NO: 115890 - DNA, 26 bp, Homo sapiens
ctgctccacatatttgaatttcatca

SEQ ID NO: 115891 - DNA, 26 bp, Homo sapiens
tgctccacatatttgaatttcatcac

SEQ ID NO: 115892 - DNA, 26 bp, Homo sapiens
gctccacatatttgaatttcatcact

SEQ ID NO: 115893 - DNA, 26 bp, Homo sapiens
ctccacatatttgaatttcatcacta

SEQ ID NO: 115894 - DNA, 26 bp, Homo sapiens
tccacatatttgaatttcatcactat

SEQ ID NO: 115895 - DNA, 26 bp, Homo sapiens
ccacatatttgaatttcatcactatt

SEQ ID NO: 115896 - DNA, 26 bp, Homo sapiens
cacatatttgaatttcatcactattg

SEQ ID NO: 115897 - DNA, 26 bp, Homo sapiens
acatatttgaatttcatcactattga

SEQ ID NO: 115898 - DNA, 26 bp, Homo sapiens
catatttgaatttcatcactattgat

SEQ ID NO: 115899 - DNA, 26 bp, Homo sapiens
atatttgaatttcatcactattgata

SEQ ID NO: 115900 - DNA, 26 bp, Homo sapiens
tatttgaatttcatcactattgatac

SEQ ID NO: 115901 - DNA, 26 bp, Homo sapiens
atttgaatttcatcactattgataca

SEQ ID NO: 115902 - DNA, 26 bp, Homo sapiens
tttgaatttcatcactattgatacag

SEQ ID NO: 115903 - DNA, 26 bp, Homo sapiens
ttgaatttcatcactattgatacagg

SEQ ID NO: 115904 - DNA, 26 bp, Homo sapiens
tgaatttcatcactattgatacaggc

SEQ ID NO: 115905 - DNA, 26 bp, Homo sapiens
gaatttcatcactattgatacaggcc

SEQ ID NO: 115906 - DNA, 26 bp, Homo sapiens
aatttcatcactattgatacaggcca

SEQ ID NO: 115907 - DNA, 26 bp, Homo sapiens
atttcatcactattgatacaggccag

SEQ ID NO: 115908 - DNA, 26 bp, Homo sapiens
tttcatcactattgatacaggccagt

SEQ ID NO: 115909 - DNA, 26 bp, Homo sapiens
ttcatcactattgatacaggccagtt

SEQ ID NO: 115910 - DNA, 26 bp, Homo sapiens
tcatcactattgatacaggccagttt

SEQ ID NO: 115911 - DNA, 26 bp, Homo sapiens
catcactattgatacaggccagtttg

SEQ ID NO: 115912 - DNA, 26 bp, Homo sapiens
atcactattgatacaggccagtttgc

SEQ ID NO: 115913 - DNA, 26 bp, Homo sapiens
tcactattgatacaggccagtttgca

SEQ ID NO: 115914 - DNA, 26 bp, Homo sapiens
cactattgatacaggccagtttgcag

SEQ ID NO: 115915 - DNA, 26 bp, Homo sapiens
actattgatacaggccagtttgcaga

SEQ ID NO: 115916 - DNA, 26 bp, Homo sapiens
ctattgatacaggccagtttgcagac

SEQ ID NO: 115917 - DNA, 26 bp, Homo sapiens
tattgatacaggccagtttgcagaca

SEQ ID NO: 115918 - DNA, 26 bp, Homo sapiens
attgatacaggccagtttgcagacaa

SEQ ID NO: 115919 - DNA, 26 bp, Homo sapiens
ttgatacaggccagtttgcagacaaa

SEQ ID NO: 115920 - DNA, 26 bp, Homo sapiens
tgatacaggccagtttgcagacaaac

SEQ ID NO: 115921 - DNA, 26 bp, Homo sapiens
gatacaggccagtttgcagacaaaca

SEQ ID NO: 115922 - DNA, 26 bp, Homo sapiens
atacaggccagtttgcagacaaacaa

SEQ ID NO: 115923 - DNA, 26 bp, Homo sapiens
tacaggccagtttgcagacaaacaag

SEQ ID NO: 115924 - DNA, 26 bp, Homo sapiens
acaggccagtttgcagacaaacaagg

SEQ ID NO: 115925 - DNA, 26 bp, Homo sapiens
caggccagtttgcagacaaacaaggt

SEQ ID NO: 115926 - DNA, 26 bp, Homo sapiens
aggccagtttgcagacaaacaaggtt

SEQ ID NO: 115927 - DNA, 26 bp, Homo sapiens
ggccagtttgcagacaaacaaggttg

SEQ ID NO: 115928 - DNA, 26 bp, Homo sapiens
gccagtttgcagacaaacaaggttgt

SEQ ID NO: 115929 - DNA, 26 bp, Homo sapiens
ccagtttgcagacaaacaaggttgta

SEQ ID NO: 115930 - DNA, 26 bp, Homo sapiens
cagtttgcagacaaacaaggttgtac

SEQ ID NO: 115931 - DNA, 26 bp, Homo sapiens
agtttgcagacaaacaaggttgtacc

SEQ ID NO: 115932 - DNA, 26 bp, Homo sapiens
gtttgcagacaaacaaggttgtacca

SEQ ID NO: 115933 - DNA, 26 bp, Homo sapiens
tttgcagacaaacaaggttgtaccaa

SEQ ID NO: 115934 - DNA, 26 bp, Homo sapiens
ttgcagacaaacaaggttgtaccaag

SEQ ID NO: 115935 - DNA, 26 bp, Homo sapiens
tgcagacaaacaaggttgtaccaagg

SEQ ID NO: 115936 - DNA, 26 bp, Homo sapiens
gcagacaaacaaggttgtaccaaggg

SEQ ID NO: 115937 - DNA, 26 bp, Homo sapiens
cagacaaacaaggttgtaccaagggg

SEQ ID NO: 115938 - DNA, 26 bp, Homo sapiens
agacaaacaaggttgtaccaagggga

SEQ ID NO: 115939 - DNA, 26 bp, Homo sapiens
gacaaacaaggttgtaccaaggggaa

SEQ ID NO: 115940 - DNA, 26 bp, Homo sapiens
acaaacaaggttgtaccaaggggaag

SEQ ID NO: 115941 - DNA, 26 bp, Homo sapiens
caaacaaggttgtaccaaggggaaga

SEQ ID NO: 115942 - DNA, 26 bp, Homo sapiens
aaacaaggttgtaccaaggggaagac

SEQ ID NO: 115943 - DNA, 26 bp, Homo sapiens
aacaaggttgtaccaaggggaagacc

SEQ ID NO: 115944 - DNA, 26 bp, Homo sapiens
acaaggttgtaccaaggggaagacct

SEQ ID NO: 115945 - DNA, 26 bp, Homo sapiens
caaggttgtaccaaggggaagacctg

SEQ ID NO: 115946 - DNA, 26 bp, Homo sapiens
aaggttgtaccaaggggaagacctgt

SEQ ID NO: 115947 - DNA, 26 bp, Homo sapiens
aggttgtaccaaggggaagacctgtg

SEQ ID NO: 115948 - DNA, 26 bp, Homo sapiens
ggttgtaccaaggggaagacctgtga

SEQ ID NO: 115949 - DNA, 26 bp, Homo sapiens
gttgtaccaaggggaagacctgtgac

SEQ ID NO: 115950 - DNA, 26 bp, Homo sapiens
ttgtaccaaggggaagacctgtgact

SEQ ID NO: 115951 - DNA, 26 bp, Homo sapiens
tgtaccaaggggaagacctgtgactt

SEQ ID NO: 115952 - DNA, 26 bp, Homo sapiens
gtaccaaggggaagacctgtgacttg

SEQ ID NO: 115953 - DNA, 26 bp, Homo sapiens
taccaaggggaagacctgtgacttga

SEQ ID NO: 115954 - DNA, 26 bp, Homo sapiens
accaaggggaagacctgtgacttgag

SEQ ID NO: 115955 - DNA, 26 bp, Homo sapiens
ccaaggggaagacctgtgacttgaga

SEQ ID NO: 115956 - DNA, 26 bp, Homo sapiens
caaggggaagacctgtgacttgagaa

SEQ ID NO: 115957 - DNA, 26 bp, Homo sapiens
aaggggaagacctgtgacttgagaat

SEQ ID NO: 115958 - DNA, 26 bp, Homo sapiens
aggggaagacctgtgacttgagaatt

SEQ ID NO: 115959 - DNA, 26 bp, Homo sapiens
ggggaagacctgtgacttgagaattg

SEQ ID NO: 115960 - DNA, 26 bp, Homo sapiens
gggaagacctgtgacttgagaattga

SEQ ID NO: 115961 - DNA, 26 bp, Homo sapiens
ggaagacctgtgacttgagaattgag

SEQ ID NO: 115962 - DNA, 26 bp, Homo sapiens
gaagacctgtgacttgagaattgagg

SEQ ID NO: 115963 - DNA, 26 bp, Homo sapiens
aagacctgtgacttgagaattgaggg

SEQ ID NO: 115964 - DNA, 26 bp, Homo sapiens
agacctgtgacttgagaattgaggga

SEQ ID NO: 115965 - DNA, 26 bp, Homo sapiens
gacctgtgacttgagaattgagggag

SEQ ID NO: 115966 - DNA, 26 bp, Homo sapiens
acctgtgacttgagaattgagggagt

SEQ ID NO: 115967 - DNA, 26 bp, Homo sapiens
cctgtgacttgagaattgagggagtg

SEQ ID NO: 115968 - DNA, 26 bp, Homo sapiens
ctgtgacttgagaattgagggagtgg

SEQ ID NO: 115969 - DNA, 26 bp, Homo sapiens
tgtgacttgagaattgagggagtggc

SEQ ID NO: 115970 - DNA, 26 bp, Homo sapiens
gtgacttgagaattgagggagtggcc

SEQ ID NO: 115971 - DNA, 26 bp, Homo sapiens
tgacttgagaattgagggagtggcca

SEQ ID NO: 115972 - DNA, 26 bp, Homo sapiens
gacttgagaattgagggagtggccat

SEQ ID NO: 115973 - DNA, 26 bp, Homo sapiens
acttgagaattgagggagtggccatg

SEQ ID NO: 115974 - DNA, 26 bp, Homo sapiens
cttgagaattgagggagtggccatgg

SEQ ID NO: 115975 - DNA, 26 bp, Homo sapiens
ttgagaattgagggagtggccatggt

SEQ ID NO: 115976 - DNA, 26 bp, Homo sapiens
tgagaattgagggagtggccatggtg

SEQ ID NO: 115977 - DNA, 26 bp, Homo sapiens
gagaattgagggagtggccatggtga

SEQ ID NO: 115978 - DNA, 26 bp, Homo sapiens
agaattgagggagtggccatggtgaa

SEQ ID NO: 115979 - DNA, 26 bp, Homo sapiens
gaattgagggagtggccatggtgaaa

SEQ ID NO: 115980 - DNA, 26 bp, Homo sapiens
aattgagggagtggccatggtgaaaa

SEQ ID NO: 115981 - DNA, 26 bp, Homo sapiens
attgagggagtggccatggtgaaaat

SEQ ID NO: 115982 - DNA, 26 bp, Homo sapiens
ttgagggagtggccatggtgaaaatt

SEQ ID NO: 115983 - DNA, 26 bp, Homo sapiens
tgagggagtggccatggtgaaaattg

SEQ ID NO: 115984 - DNA, 26 bp, Homo sapiens
gagggagtggccatggtgaaaattga

SEQ ID NO: 115985 - DNA, 26 bp, Homo sapiens
agggagtggccatggtgaaaattgat

SEQ ID NO: 115986 - DNA, 26 bp, Homo sapiens
gggagtggccatggtgaaaattgatt

SEQ ID NO: 115987 - DNA, 26 bp, Homo sapiens
ggagtggccatggtgaaaattgattc

SEQ ID NO: 115988 - DNA, 26 bp, Homo sapiens
gagtggccatggtgaaaattgattct

SEQ ID NO: 115989 - DNA, 26 bp, Homo sapiens
agtggccatggtgaaaattgattctt

SEQ ID NO: 115990 - DNA, 26 bp, Homo sapiens
gtggccatggtgaaaattgattcttc

SEQ ID NO: 115991 - DNA, 26 bp, Homo sapiens
tggccatggtgaaaattgattcttct

SEQ ID NO: 115992 - DNA, 26 bp, Homo sapiens
ggccatggtgaaaattgattcttctg

SEQ ID NO: 115993 - DNA, 26 bp, Homo sapiens
gccatggtgaaaattgattcttctgt

SEQ ID NO: 115994 - DNA, 26 bp, Homo sapiens
ccatggtgaaaattgattcttctgtc

SEQ ID NO: 115995 - DNA, 26 bp, Homo sapiens
catggtgaaaattgattcttctgtca

SEQ ID NO: 115996 - DNA, 26 bp, Homo sapiens
atggtgaaaattgattcttctgtcaa

SEQ ID NO: 115997 - DNA, 26 bp, Homo sapiens
tggtgaaaattgattcttctgtcaaa

SEQ ID NO: 115998 - DNA, 26 bp, Homo sapiens
ggtgaaaattgattcttctgtcaaac

SEQ ID NO: 115999 - DNA, 26 bp, Homo sapiens
gtgaaaattgattcttctgtcaaact

SEQ ID NO: 116000 - DNA, 26 bp, Homo sapiens
tgaaaattgattcttctgtcaaactt

SEQ ID NO: 116001 - DNA, 26 bp, Homo sapiens
gaaaattgattcttctgtcaaacttg

SEQ ID NO: 116002 - DNA, 26 bp, Homo sapiens
aaaattgattcttctgtcaaacttgt

SEQ ID NO: 116003 - DNA, 26 bp, Homo sapiens
aaattgattcttctgtcaaacttgta

SEQ ID NO: 116004 - DNA, 26 bp, Homo sapiens
aattgattcttctgtcaaacttgtac

SEQ ID NO: 116005 - DNA, 26 bp, Homo sapiens
attgattcttctgtcaaacttgtaca

SEQ ID NO: 116006 - DNA, 26 bp, Homo sapiens
ttgattcttctgtcaaacttgtacag

SEQ ID NO: 116007 - DNA, 26 bp, Homo sapiens
tgattcttctgtcaaacttgtacagg

SEQ ID NO: 116008 - DNA, 26 bp, Homo sapiens
gattcttctgtcaaacttgtacagga

SEQ ID NO: 116009 - DNA, 26 bp, Homo sapiens
attcttctgtcaaacttgtacaggat

SEQ ID NO: 116010 - DNA, 26 bp, Homo sapiens
ttcttctgtcaaacttgtacaggatt

SEQ ID NO: 116011 - DNA, 26 bp, Homo sapiens
tcttctgtcaaacttgtacaggatta

SEQ ID NO: 116012 - DNA, 26 bp, Homo sapiens
cttctgtcaaacttgtacaggattaa

SEQ ID NO: 116013 - DNA, 26 bp, Homo sapiens
ttctgtcaaacttgtacaggattaac

SEQ ID NO: 116014 - DNA, 26 bp, Homo sapiens
tctgtcaaacttgtacaggattaact

SEQ ID NO: 116015 - DNA, 26 bp, Homo sapiens
ctgtcaaacttgtacaggattaactt

SEQ ID NO: 116016 - DNA, 26 bp, Homo sapiens
tgtcaaacttgtacaggattaacttg

SEQ ID NO: 116017 - DNA, 26 bp, Homo sapiens
gtcaaacttgtacaggattaacttgt

SEQ ID NO: 116018 - DNA, 26 bp, Homo sapiens
tcaaacttgtacaggattaacttgtt

SEQ ID NO: 116019 - DNA, 26 bp, Homo sapiens
caaacttgtacaggattaacttgtta

SEQ ID NO: 116020 - DNA, 26 bp, Homo sapiens
aaacttgtacaggattaacttgttac

SEQ ID NO: 116021 - DNA, 26 bp, Homo sapiens
aacttgtacaggattaacttgttacg

SEQ ID NO: 116022 - DNA, 26 bp, Homo sapiens
acttgtacaggattaacttgttacgt

SEQ ID NO: 116023 - DNA, 26 bp, Homo sapiens
cttgtacaggattaacttgttacgtc

SEQ ID NO: 116024 - DNA, 26 bp, Homo sapiens
ttgtacaggattaacttgttacgtct

SEQ ID NO: 116025 - DNA, 26 bp, Homo sapiens
tgtacaggattaacttgttacgtctg

SEQ ID NO: 116026 - DNA, 26 bp, Homo sapiens
gtacaggattaacttgttacgtctgg

SEQ ID NO: 116027 - DNA, 26 bp, Homo sapiens
tacaggattaacttgttacgtctgga

SEQ ID NO: 116028 - DNA, 26 bp, Homo sapiens
acaggattaacttgttacgtctggaa

SEQ ID NO: 116029 - DNA, 26 bp, Homo sapiens
caggattaacttgttacgtctggaat

SEQ ID NO: 116030 - DNA, 26 bp, Homo sapiens
aggattaacttgttacgtctggaata

SEQ ID NO: 116031 - DNA, 26 bp, Homo sapiens
ggattaacttgttacgtctggaatag

SEQ ID NO: 116032 - DNA, 26 bp, Homo sapiens
gattaacttgttacgtctggaatagt

SEQ ID NO: 116033 - DNA, 26 bp, Homo sapiens
attaacttgttacgtctggaatagtg

SEQ ID NO: 116034 - DNA, 26 bp, Homo sapiens
ttaacttgttacgtctggaatagtga

SEQ ID NO: 116035 - DNA, 26 bp, Homo sapiens
taacttgttacgtctggaatagtgaa

SEQ ID NO: 116036 - DNA, 26 bp, Homo sapiens
aacttgttacgtctggaatagtgaaa

SEQ ID NO: 116037 - DNA, 26 bp, Homo sapiens
acttgttacgtctggaatagtgaaag

SEQ ID NO: 116038 - DNA, 26 bp, Homo sapiens
cttgttacgtctggaatagtgaaagc

SEQ ID NO: 116039 - DNA, 26 bp, Homo sapiens
ttgttacgtctggaatagtgaaagca

SEQ ID NO: 116040 - DNA, 26 bp, Homo sapiens
tgttacgtctggaatagtgaaagcag

SEQ ID NO: 116041 - DNA, 26 bp, Homo sapiens
gttacgtctggaatagtgaaagcagc

SEQ ID NO: 116042 - DNA, 26 bp, Homo sapiens
ttacgtctggaatagtgaaagcagcc

SEQ ID NO: 116043 - DNA, 26 bp, Homo sapiens
tacgtctggaatagtgaaagcagcct

SEQ ID NO: 116044 - DNA, 26 bp, Homo sapiens
acgtctggaatagtgaaagcagcctt

SEQ ID NO: 116045 - DNA, 26 bp, Homo sapiens
cgtctggaatagtgaaagcagccttg

SEQ ID NO: 116046 - DNA, 26 bp, Homo sapiens
gtctggaatagtgaaagcagccttgt

SEQ ID NO: 116047 - DNA, 26 bp, Homo sapiens
tctggaatagtgaaagcagccttgtc

SEQ ID NO: 116048 - DNA, 26 bp, Homo sapiens
ctggaatagtgaaagcagccttgtct

SEQ ID NO: 116049 - DNA, 26 bp, Homo sapiens
tggaatagtgaaagcagccttgtctg

SEQ ID NO: 116050 - DNA, 26 bp, Homo sapiens
ggaatagtgaaagcagccttgtctgg

SEQ ID NO: 116051 - DNA, 26 bp, Homo sapiens
gaatagtgaaagcagccttgtctggg

SEQ ID NO: 116052 - DNA, 26 bp, Homo sapiens
aatagtgaaagcagccttgtctgggc

SEQ ID NO: 116053 - DNA, 26 bp, Homo sapiens
atagtgaaagcagccttgtctgggct

SEQ ID NO: 116054 - DNA, 26 bp, Homo sapiens
tagtgaaagcagccttgtctgggctt

SEQ ID NO: 116055 - DNA, 26 bp, Homo sapiens
agtgaaagcagccttgtctgggcttc

SEQ ID NO: 116056 - DNA, 26 bp, Homo sapiens
gtgaaagcagccttgtctgggcttca

SEQ ID NO: 116057 - DNA, 26 bp, Homo sapiens
tgaaagcagccttgtctgggcttcaa

SEQ ID NO: 116058 - DNA, 26 bp, Homo sapiens
gaaagcagccttgtctgggcttcaaa

SEQ ID NO: 116059 - DNA, 26 bp, Homo sapiens
aaagcagccttgtctgggcttcaaag

SEQ ID NO: 116060 - DNA, 26 bp, Homo sapiens
aagcagccttgtctgggcttcaaaga

SEQ ID NO: 116061 - DNA, 26 bp, Homo sapiens
agcagccttgtctgggcttcaaagag

SEQ ID NO: 116062 - DNA, 26 bp, Homo sapiens
gcagccttgtctgggcttcaaagagc

SEQ ID NO: 116063 - DNA, 26 bp, Homo sapiens
cagccttgtctgggcttcaaagagca

SEQ ID NO: 116064 - DNA, 26 bp, Homo sapiens
agccttgtctgggcttcaaagagcat

SEQ ID NO: 116065 - DNA, 26 bp, Homo sapiens
gccttgtctgggcttcaaagagcatg

SEQ ID NO: 116066 - DNA, 26 bp, Homo sapiens
ccttgtctgggcttcaaagagcatgt

SEQ ID NO: 116067 - DNA, 26 bp, Homo sapiens
cttgtctgggcttcaaagagcatgta

SEQ ID NO: 116068 - DNA, 26 bp, Homo sapiens
ttgtctgggcttcaaagagcatgtaa

SEQ ID NO: 116069 - DNA, 26 bp, Homo sapiens
tgtctgggcttcaaagagcatgtaat

SEQ ID NO: 116070 - DNA, 26 bp, Homo sapiens
gtctgggcttcaaagagcatgtaata

SEQ ID NO: 116071 - DNA, 26 bp, Homo sapiens
tctgggcttcaaagagcatgtaatat

SEQ ID NO: 116072 - DNA, 26 bp, Homo sapiens
ctgggcttcaaagagcatgtaatatt

SEQ ID NO: 116073 - DNA, 26 bp, Homo sapiens
tgggcttcaaagagcatgtaatattg

SEQ ID NO: 116074 - DNA, 26 bp, Homo sapiens
gggcttcaaagagcatgtaatattga

SEQ ID NO: 116075 - DNA, 26 bp, Homo sapiens
ggcttcaaagagcatgtaatattgac

SEQ ID NO: 116076 - DNA, 26 bp, Homo sapiens
gcttcaaagagcatgtaatattgaca

SEQ ID NO: 116077 - DNA, 26 bp, Homo sapiens
cttcaaagagcatgtaatattgacag

SEQ ID NO: 116078 - DNA, 26 bp, Homo sapiens
ttcaaagagcatgtaatattgacagt

SEQ ID NO: 116079 - DNA, 26 bp, Homo sapiens
tcaaagagcatgtaatattgacagtg

SEQ ID NO: 116080 - DNA, 26 bp, Homo sapiens
caaagagcatgtaatattgacagtgg

SEQ ID NO: 116081 - DNA, 26 bp, Homo sapiens
aaagagcatgtaatattgacagtgga

SEQ ID NO: 116082 - DNA, 26 bp, Homo sapiens
aagagcatgtaatattgacagtggat

SEQ ID NO: 116083 - DNA, 26 bp, Homo sapiens
agagcatgtaatattgacagtggatc

SEQ ID NO: 116084 - DNA, 26 bp, Homo sapiens
gagcatgtaatattgacagtggatcc

SEQ ID NO: 116085 - DNA, 26 bp, Homo sapiens
agcatgtaatattgacagtggatcca

SEQ ID NO: 116086 - DNA, 26 bp, Homo sapiens
gcatgtaatattgacagtggatccaa

SEQ ID NO: 116087 - DNA, 26 bp, Homo sapiens
catgtaatattgacagtggatccaag

SEQ ID NO: 116088 - DNA, 26 bp, Homo sapiens
atgtaatattgacagtggatccaagt

SEQ ID NO: 116089 - DNA, 26 bp, Homo sapiens
tgtaatattgacagtggatccaagta

SEQ ID NO: 116090 - DNA, 26 bp, Homo sapiens
gtaatattgacagtggatccaagtaa

SEQ ID NO: 116091 - DNA, 26 bp, Homo sapiens
taatattgacagtggatccaagtaaa

SEQ ID NO: 116092 - DNA, 26 bp, Homo sapiens
aatattgacagtggatccaagtaaaa

SEQ ID NO: 116093 - DNA, 26 bp, Homo sapiens
atattgacagtggatccaagtaaaat

SEQ ID NO: 116094 - DNA, 26 bp, Homo sapiens
tattgacagtggatccaagtaaaatt

SEQ ID NO: 116095 - DNA, 26 bp, Homo sapiens
attgacagtggatccaagtaaaatta

SEQ ID NO: 116096 - DNA, 26 bp, Homo sapiens
ttgacagtggatccaagtaaaattac

SEQ ID NO: 116097 - DNA, 26 bp, Homo sapiens
tgacagtggatccaagtaaaattaca

SEQ ID NO: 116098 - DNA, 26 bp, Homo sapiens
gacagtggatccaagtaaaattacat

SEQ ID NO: 116099 - DNA, 26 bp, Homo sapiens
acagtggatccaagtaaaattacatg

SEQ ID NO: 116100 - DNA, 26 bp, Homo sapiens
cagtggatccaagtaaaattacatgg

SEQ ID NO: 116101 - DNA, 26 bp, Homo sapiens
agtggatccaagtaaaattacatggg

SEQ ID NO: 116102 - DNA, 26 bp, Homo sapiens
gtggatccaagtaaaattacatggga

SEQ ID NO: 116103 - DNA, 26 bp, Homo sapiens
tggatccaagtaaaattacatgggaa

SEQ ID NO: 116104 - DNA, 26 bp, Homo sapiens
ggatccaagtaaaattacatgggaag

SEQ ID NO: 116105 - DNA, 26 bp, Homo sapiens
gatccaagtaaaattacatgggaagg

SEQ ID NO: 116106 - DNA, 26 bp, Homo sapiens
atccaagtaaaattacatgggaaggc

SEQ ID NO: 116107 - DNA, 26 bp, Homo sapiens
tccaagtaaaattacatgggaaggct

SEQ ID NO: 116108 - DNA, 26 bp, Homo sapiens
ccaagtaaaattacatgggaaggctt

SEQ ID NO: 116109 - DNA, 26 bp, Homo sapiens
caagtaaaattacatgggaaggcttc

SEQ ID NO: 116110 - DNA, 26 bp, Homo sapiens
aagtaaaattacatgggaaggcttca

SEQ ID NO: 116111 - DNA, 26 bp, Homo sapiens
agtaaaattacatgggaaggcttcac

SEQ ID NO: 116112 - DNA, 26 bp, Homo sapiens
gtaaaattacatgggaaggcttcaca

SEQ ID NO: 116113 - DNA, 26 bp, Homo sapiens
taaaattacatgggaaggcttcacag

SEQ ID NO: 116114 - DNA, 26 bp, Homo sapiens
aaaattacatgggaaggcttcacagt

SEQ ID NO: 116115 - DNA, 26 bp, Homo sapiens
aaattacatgggaaggcttcacagtc

SEQ ID NO: 116116 - DNA, 26 bp, Homo sapiens
aattacatgggaaggcttcacagtca

SEQ ID NO: 116117 - DNA, 26 bp, Homo sapiens
attacatgggaaggcttcacagtcac

SEQ ID NO: 116118 - DNA, 26 bp, Homo sapiens
ttacatgggaaggcttcacagtcaca

SEQ ID NO: 116119 - DNA, 26 bp, Homo sapiens
tacatgggaaggcttcacagtcacat

SEQ ID NO: 116120 - DNA, 26 bp, Homo sapiens
acatgggaaggcttcacagtcacatc

SEQ ID NO: 116121 - DNA, 26 bp, Homo sapiens
catgggaaggcttcacagtcacatcg

SEQ ID NO: 116122 - DNA, 26 bp, Homo sapiens
atgggaaggcttcacagtcacatcgc

SEQ ID NO: 116123 - DNA, 26 bp, Homo sapiens
tgggaaggcttcacagtcacatcgcc

SEQ ID NO: 116124 - DNA, 26 bp, Homo sapiens
gggaaggcttcacagtcacatcgcct

SEQ ID NO: 116125 - DNA, 26 bp, Homo sapiens
ggaaggcttcacagtcacatcgcctc

SEQ ID NO: 116126 - DNA, 26 bp, Homo sapiens
gaaggcttcacagtcacatcgcctct

SEQ ID NO: 116127 - DNA, 26 bp, Homo sapiens
aaggcttcacagtcacatcgcctctc

SEQ ID NO: 116128 - DNA, 26 bp, Homo sapiens
aggcttcacagtcacatcgcctctct

SEQ ID NO: 116129 - DNA, 26 bp, Homo sapiens
ggcttcacagtcacatcgcctctctt

SEQ ID NO: 116130 - DNA, 26 bp, Homo sapiens
gcttcacagtcacatcgcctctcttg

SEQ ID NO: 116131 - DNA, 26 bp, Homo sapiens
cttcacagtcacatcgcctctcttgc

SEQ ID NO: 116132 - DNA, 26 bp, Homo sapiens
ttcacagtcacatcgcctctcttgca

SEQ ID NO: 116133 - DNA, 26 bp, Homo sapiens
tcacagtcacatcgcctctcttgcac

SEQ ID NO: 116134 - DNA, 26 bp, Homo sapiens
cacagtcacatcgcctctcttgcacg

SEQ ID NO: 116135 - DNA, 26 bp, Homo sapiens
acagtcacatcgcctctcttgcacgc

SEQ ID NO: 116136 - DNA, 26 bp, Homo sapiens
cagtcacatcgcctctcttgcacgca

SEQ ID NO: 116137 - DNA, 26 bp, Homo sapiens
agtcacatcgcctctcttgcacgcat

SEQ ID NO: 116138 - DNA, 26 bp, Homo sapiens
gtcacatcgcctctcttgcacgcatc

SEQ ID NO: 116139 - DNA, 26 bp, Homo sapiens
tcacatcgcctctcttgcacgcatct

SEQ ID NO: 116140 - DNA, 26 bp, Homo sapiens
cacatcgcctctcttgcacgcatcta

SEQ ID NO: 116141 - DNA, 26 bp, Homo sapiens
acatcgcctctcttgcacgcatctat

SEQ ID NO: 116142 - DNA, 26 bp, Homo sapiens
catcgcctctcttgcacgcatctatt

SEQ ID NO: 116143 - DNA, 26 bp, Homo sapiens
atcgcctctcttgcacgcatctattt

SEQ ID NO: 116144 - DNA, 26 bp, Homo sapiens
tcgcctctcttgcacgcatctatttt

SEQ ID NO: 116145 - DNA, 26 bp, Homo sapiens
cgcctctcttgcacgcatctattttt

SEQ ID NO: 116146 - DNA, 26 bp, Homo sapiens
gcctctcttgcacgcatctatttttg

SEQ ID NO: 116147 - DNA, 26 bp, Homo sapiens
cctctcttgcacgcatctatttttgc

SEQ ID NO: 116148 - DNA, 26 bp, Homo sapiens
ctctcttgcacgcatctatttttgct

SEQ ID NO: 116149 - DNA, 26 bp, Homo sapiens
tctcttgcacgcatctatttttgctt

SEQ ID NO: 116150 - DNA, 26 bp, Homo sapiens
ctcttgcacgcatctatttttgcttt

SEQ ID NO: 116151 - DNA, 26 bp, Homo sapiens
tcttgcacgcatctatttttgcttta

SEQ ID NO: 116152 - DNA, 26 bp, Homo sapiens
cttgcacgcatctatttttgctttaa

SEQ ID NO: 116153 - DNA, 26 bp, Homo sapiens
ttgcacgcatctatttttgctttaat

SEQ ID NO: 116154 - DNA, 26 bp, Homo sapiens
tgcacgcatctatttttgctttaatc

SEQ ID NO: 116155 - DNA, 26 bp, Homo sapiens
gcacgcatctatttttgctttaatca

SEQ ID NO: 116156 - DNA, 26 bp, Homo sapiens
cacgcatctatttttgctttaatcaa

SEQ ID NO: 116157 - DNA, 26 bp, Homo sapiens
acgcatctatttttgctttaatcaac

SEQ ID NO: 116158 - DNA, 26 bp, Homo sapiens
cgcatctatttttgctttaatcaaca

SEQ ID NO: 116159 - DNA, 26 bp, Homo sapiens
gcatctatttttgctttaatcaacag

SEQ ID NO: 116160 - DNA, 26 bp, Homo sapiens
catctatttttgctttaatcaacagc

SEQ ID NO: 116161 - DNA, 26 bp, Homo sapiens
atctatttttgctttaatcaacagcc

SEQ ID NO: 116162 - DNA, 26 bp, Homo sapiens
tctatttttgctttaatcaacagcca

SEQ ID NO: 116163 - DNA, 26 bp, Homo sapiens
ctatttttgctttaatcaacagccac

SEQ ID NO: 116164 - DNA, 26 bp, Homo sapiens
tatttttgctttaatcaacagccacg

SEQ ID NO: 116165 - DNA, 26 bp, Homo sapiens
atttttgctttaatcaacagccacgt

SEQ ID NO: 116166 - DNA, 26 bp, Homo sapiens
tttttgctttaatcaacagccacgtg

SEQ ID NO: 116167 - DNA, 26 bp, Homo sapiens
ttttgctttaatcaacagccacgtga

SEQ ID NO: 116168 - DNA, 26 bp, Homo sapiens
tttgctttaatcaacagccacgtgat

SEQ ID NO: 116169 - DNA, 26 bp, Homo sapiens
ttgctttaatcaacagccacgtgatt

SEQ ID NO: 116170 - DNA, 26 bp, Homo sapiens
tgctttaatcaacagccacgtgatta

SEQ ID NO: 116171 - DNA, 26 bp, Homo sapiens
gctttaatcaacagccacgtgattat

SEQ ID NO: 116172 - DNA, 26 bp, Homo sapiens
ctttaatcaacagccacgtgattata

SEQ ID NO: 116173 - DNA, 26 bp, Homo sapiens
tttaatcaacagccacgtgattataa

SEQ ID NO: 116174 - DNA, 26 bp, Homo sapiens
ttaatcaacagccacgtgattataaa

SEQ ID NO: 116175 - DNA, 26 bp, Homo sapiens
taatcaacagccacgtgattataaac

SEQ ID NO: 116176 - DNA, 26 bp, Homo sapiens
aatcaacagccacgtgattataaaca

SEQ ID NO: 116177 - DNA, 26 bp, Homo sapiens
atcaacagccacgtgattataaacat

SEQ ID NO: 116178 - DNA, 26 bp, Homo sapiens
tcaacagccacgtgattataaacata

SEQ ID NO: 116179 - DNA, 26 bp, Homo sapiens
caacagccacgtgattataaacataa

SEQ ID NO: 116180 - DNA, 26 bp, Homo sapiens
aacagccacgtgattataaacataaa

SEQ ID NO: 116181 - DNA, 26 bp, Homo sapiens
acagccacgtgattataaacataaat

SEQ ID NO: 116182 - DNA, 26 bp, Homo sapiens
cagccacgtgattataaacataaatg

SEQ ID NO: 116183 - DNA, 26 bp, Homo sapiens
agccacgtgattataaacataaatgc

SEQ ID NO: 116184 - DNA, 26 bp, Homo sapiens
gccacgtgattataaacataaatgcc

SEQ ID NO: 116185 - DNA, 26 bp, Homo sapiens
ccacgtgattataaacataaatgcca

SEQ ID NO: 116186 - DNA, 26 bp, Homo sapiens
cacgtgattataaacataaatgccaa

SEQ ID NO: 116187 - DNA, 26 bp, Homo sapiens
acgtgattataaacataaatgccaat

SEQ ID NO: 116188 - DNA, 26 bp, Homo sapiens
cgtgattataaacataaatgccaatg

SEQ ID NO: 116189 - DNA, 26 bp, Homo sapiens
gtgattataaacataaatgccaatga

SEQ ID NO: 116190 - DNA, 26 bp, Homo sapiens
tgattataaacataaatgccaatgag

SEQ ID NO: 116191 - DNA, 26 bp, Homo sapiens
gattataaacataaatgccaatgagc

SEQ ID NO: 116192 - DNA, 26 bp, Homo sapiens
attataaacataaatgccaatgagca

SEQ ID NO: 116193 - DNA, 26 bp, Homo sapiens
ttataaacataaatgccaatgagcat

SEQ ID NO: 116194 - DNA, 26 bp, Homo sapiens
tataaacataaatgccaatgagcatc

SEQ ID NO: 116195 - DNA, 26 bp, Homo sapiens
ataaacataaatgccaatgagcatcc

SEQ ID NO: 116196 - DNA, 26 bp, Homo sapiens
taaacataaatgccaatgagcatcct

SEQ ID NO: 116197 - DNA, 26 bp, Homo sapiens
aaacataaatgccaatgagcatcctc

SEQ ID NO: 116198 - DNA, 26 bp, Homo sapiens
aacataaatgccaatgagcatcctct

SEQ ID NO: 116199 - DNA, 26 bp, Homo sapiens
acataaatgccaatgagcatcctcta

SEQ ID NO: 116200 - DNA, 26 bp, Homo sapiens
cataaatgccaatgagcatcctctaa

SEQ ID NO: 116201 - DNA, 26 bp, Homo sapiens
ataaatgccaatgagcatcctctaaa

SEQ ID NO: 116202 - DNA, 26 bp, Homo sapiens
taaatgccaatgagcatcctctaaaa

SEQ ID NO: 116203 - DNA, 26 bp, Homo sapiens
aaatgccaatgagcatcctctaaaag

SEQ ID NO: 116204 - DNA, 26 bp, Homo sapiens
aatgccaatgagcatcctctaaaagt

SEQ ID NO: 116205 - DNA, 26 bp, Homo sapiens
atgccaatgagcatcctctaaaagta

SEQ ID NO: 116206 - DNA, 26 bp, Homo sapiens
tgccaatgagcatcctctaaaagtat

SEQ ID NO: 116207 - DNA, 26 bp, Homo sapiens
gccaatgagcatcctctaaaagtatg

SEQ ID NO: 116208 - DNA, 26 bp, Homo sapiens
ccaatgagcatcctctaaaagtatgt

SEQ ID NO: 116209 - DNA, 26 bp, Homo sapiens
caatgagcatcctctaaaagtatgtg

SEQ ID NO: 116210 - DNA, 26 bp, Homo sapiens
aatgagcatcctctaaaagtatgtgc

SEQ ID NO: 116211 - DNA, 26 bp, Homo sapiens
atgagcatcctctaaaagtatgtgcc

SEQ ID NO: 116212 - DNA, 26 bp, Homo sapiens
tgagcatcctctaaaagtatgtgcca

SEQ ID NO: 116213 - DNA, 26 bp, Homo sapiens
gagcatcctctaaaagtatgtgccat

SEQ ID NO: 116214 - DNA, 26 bp, Homo sapiens
agcatcctctaaaagtatgtgccatc

SEQ ID NO: 116215 - DNA, 26 bp, Homo sapiens
gcatcctctaaaagtatgtgccatca

SEQ ID NO: 116216 - DNA, 26 bp, Homo sapiens
catcctctaaaagtatgtgccatcaa

SEQ ID NO: 116217 - DNA, 26 bp, Homo sapiens
atcctctaaaagtatgtgccatcaac

SEQ ID NO: 116218 - DNA, 26 bp, Homo sapiens
tcctctaaaagtatgtgccatcaaca

SEQ ID NO: 116219 - DNA, 26 bp, Homo sapiens
cctctaaaagtatgtgccatcaacaa

SEQ ID NO: 116220 - DNA, 26 bp, Homo sapiens
ctctaaaagtatgtgccatcaacaat

SEQ ID NO: 116221 - DNA, 26 bp, Homo sapiens
tctaaaagtatgtgccatcaacaatc

SEQ ID NO: 116222 - DNA, 26 bp, Homo sapiens
ctaaaagtatgtgccatcaacaatca

SEQ ID NO: 116223 - DNA, 26 bp, Homo sapiens
taaaagtatgtgccatcaacaatcaa

SEQ ID NO: 116224 - DNA, 26 bp, Homo sapiens
aaaagtatgtgccatcaacaatcaac

SEQ ID NO: 116225 - DNA, 26 bp, Homo sapiens
aaagtatgtgccatcaacaatcaact

SEQ ID NO: 116226 - DNA, 26 bp, Homo sapiens
aagtatgtgccatcaacaatcaactc

SEQ ID NO: 116227 - DNA, 26 bp, Homo sapiens
agtatgtgccatcaacaatcaactct

SEQ ID NO: 116228 - DNA, 26 bp, Homo sapiens
gtatgtgccatcaacaatcaactctg

SEQ ID NO: 116229 - DNA, 26 bp, Homo sapiens
tatgtgccatcaacaatcaactctgg

SEQ ID NO: 116230 - DNA, 26 bp, Homo sapiens
atgtgccatcaacaatcaactctggt

SEQ ID NO: 116231 - DNA, 26 bp, Homo sapiens
tgtgccatcaacaatcaactctggta

SEQ ID NO: 116232 - DNA, 26 bp, Homo sapiens
gtgccatcaacaatcaactctggtat

SEQ ID NO: 116233 - DNA, 26 bp, Homo sapiens
tgccatcaacaatcaactctggtata

SEQ ID NO: 116234 - DNA, 26 bp, Homo sapiens
gccatcaacaatcaactctggtatag

SEQ ID NO: 116235 - DNA, 26 bp, Homo sapiens
ccatcaacaatcaactctggtataga

SEQ ID NO: 116236 - DNA, 26 bp, Homo sapiens
catcaacaatcaactctggtatagaa

SEQ ID NO: 116237 - DNA, 26 bp, Homo sapiens
atcaacaatcaactctggtatagaac

SEQ ID NO: 116238 - DNA, 26 bp, Homo sapiens
tcaacaatcaactctggtatagaact

SEQ ID NO: 116239 - DNA, 26 bp, Homo sapiens
caacaatcaactctggtatagaactc

SEQ ID NO: 116240 - DNA, 26 bp, Homo sapiens
aacaatcaactctggtatagaactcc

SEQ ID NO: 116241 - DNA, 26 bp, Homo sapiens
acaatcaactctggtatagaactccg

SEQ ID NO: 116242 - DNA, 26 bp, Homo sapiens
caatcaactctggtatagaactccgt

SEQ ID NO: 116243 - DNA, 26 bp, Homo sapiens
aatcaactctggtatagaactccgta

SEQ ID NO: 116244 - DNA, 26 bp, Homo sapiens
atcaactctggtatagaactccgtat

SEQ ID NO: 116245 - DNA, 26 bp, Homo sapiens
tcaactctggtatagaactccgtatt

SEQ ID NO: 116246 - DNA, 26 bp, Homo sapiens
caactctggtatagaactccgtattc

SEQ ID NO: 116247 - DNA, 26 bp, Homo sapiens
aactctggtatagaactccgtattct

SEQ ID NO: 116248 - DNA, 26 bp, Homo sapiens
actctggtatagaactccgtattctt

SEQ ID NO: 116249 - DNA, 26 bp, Homo sapiens
ctctggtatagaactccgtattcttc

SEQ ID NO: 116250 - DNA, 26 bp, Homo sapiens
tctggtatagaactccgtattcttcc

SEQ ID NO: 116251 - DNA, 26 bp, Homo sapiens
ctggtatagaactccgtattcttcca

SEQ ID NO: 116252 - DNA, 26 bp, Homo sapiens
tggtatagaactccgtattcttccac

SEQ ID NO: 116253 - DNA, 26 bp, Homo sapiens
ggtatagaactccgtattcttccacg

SEQ ID NO: 116254 - DNA, 26 bp, Homo sapiens
gtatagaactccgtattcttccacgt

SEQ ID NO: 116255 - DNA, 26 bp, Homo sapiens
tatagaactccgtattcttccacgtg

SEQ ID NO: 116256 - DNA, 26 bp, Homo sapiens
atagaactccgtattcttccacgtgt

SEQ ID NO: 116257 - DNA, 26 bp, Homo sapiens
tagaactccgtattcttccacgtgtc

SEQ ID NO: 116258 - DNA, 26 bp, Homo sapiens
agaactccgtattcttccacgtgtcg

SEQ ID NO: 116259 - DNA, 26 bp, Homo sapiens
gaactccgtattcttccacgtgtcgc

SEQ ID NO: 116260 - DNA, 26 bp, Homo sapiens
aactccgtattcttccacgtgtcgcc

SEQ ID NO: 116261 - DNA, 26 bp, Homo sapiens
actccgtattcttccacgtgtcgcct

SEQ ID NO: 116262 - DNA, 26 bp, Homo sapiens
ctccgtattcttccacgtgtcgcctg

SEQ ID NO: 116263 - DNA, 26 bp, Homo sapiens
tccgtattcttccacgtgtcgcctgc

SEQ ID NO: 116264 - DNA, 26 bp, Homo sapiens
ccgtattcttccacgtgtcgcctgcc

SEQ ID NO: 116265 - DNA, 26 bp, Homo sapiens
cgtattcttccacgtgtcgcctgcca

SEQ ID NO: 116266 - DNA, 26 bp, Homo sapiens
gtattcttccacgtgtcgcctgccag

SEQ ID NO: 116267 - DNA, 26 bp, Homo sapiens
tattcttccacgtgtcgcctgccagc

SEQ ID NO: 116268 - DNA, 26 bp, Homo sapiens
attcttccacgtgtcgcctgccagcg

SEQ ID NO: 116269 - DNA, 26 bp, Homo sapiens
ttcttccacgtgtcgcctgccagcgg

SEQ ID NO: 116270 - DNA, 26 bp, Homo sapiens
tcttccacgtgtcgcctgccagcggg

SEQ ID NO: 116271 - DNA, 26 bp, Homo sapiens
cttccacgtgtcgcctgccagcgggc

SEQ ID NO: 116272 - DNA, 26 bp, Homo sapiens
ttccacgtgtcgcctgccagcgggcg

SEQ ID NO: 116273 - DNA, 26 bp, Homo sapiens
tccacgtgtcgcctgccagcgggcgc

SEQ ID NO: 116274 - DNA, 26 bp, Homo sapiens
ccacgtgtcgcctgccagcgggcgcg

SEQ ID NO: 116275 - DNA, 26 bp, Homo sapiens
cacgtgtcgcctgccagcgggcgcgg

SEQ ID NO: 116276 - DNA, 26 bp, Homo sapiens
acgtgtcgcctgccagcgggcgcggt

SEQ ID NO: 116277 - DNA, 26 bp, Homo sapiens
cgtgtcgcctgccagcgggcgcggtc

SEQ ID NO: 116278 - DNA, 26 bp, Homo sapiens
gtgtcgcctgccagcgggcgcggtcc

SEQ ID NO: 116279 - DNA, 26 bp, Homo sapiens
tgtcgcctgccagcgggcgcggtccc

SEQ ID NO: 116280 - DNA, 26 bp, Homo sapiens
gtcgcctgccagcgggcgcggtcccg

SEQ ID NO: 116281 - DNA, 26 bp, Homo sapiens
tcgcctgccagcgggcgcggtcccgg

SEQ ID NO: 116282 - DNA, 26 bp, Homo sapiens
cgcctgccagcgggcgcggtcccggg

SEQ ID NO: 116283 - DNA, 26 bp, Homo sapiens
gcctgccagcgggcgcggtcccgggc

SEQ ID NO: 116284 - DNA, 26 bp, Homo sapiens
cctgccagcgggcgcggtcccgggcc

SEQ ID NO: 116285 - DNA, 26 bp, Homo sapiens
ctgccagcgggcgcggtcccgggcct

SEQ ID NO: 116286 - DNA, 26 bp, Homo sapiens
tgccagcgggcgcggtcccgggcctg

SEQ ID NO: 116287 - DNA, 26 bp, Homo sapiens
gccagcgggcgcggtcccgggcctgc

SEQ ID NO: 116288 - DNA, 26 bp, Homo sapiens
ccagcgggcgcggtcccgggcctgcg

SEQ ID NO: 116289 - DNA, 26 bp, Homo sapiens
cagcgggcgcggtcccgggcctgcgg

SEQ ID NO: 116290 - DNA, 26 bp, Homo sapiens
agcgggcgcggtcccgggcctgcggg

SEQ ID NO: 116291 - DNA, 26 bp, Homo sapiens
gcgggcgcggtcccgggcctgcgggg

SEQ ID NO: 116292 - DNA, 26 bp, Homo sapiens
cgggcgcggtcccgggcctgcgggga

SEQ ID NO: 116293 - DNA, 26 bp, Homo sapiens
gggcgcggtcccgggcctgcggggac

SEQ ID NO: 116294 - DNA, 26 bp, Homo sapiens
ggcgcggtcccgggcctgcggggacc

SEQ ID NO: 116295 - DNA, 26 bp, Homo sapiens
gcgcggtcccgggcctgcggggaccg

SEQ ID NO: 116296 - DNA, 26 bp, Homo sapiens
cgcggtcccgggcctgcggggaccgg

SEQ ID NO: 116297 - DNA, 26 bp, Homo sapiens
gcggtcccgggcctgcggggaccggg

SEQ ID NO: 116298 - DNA, 26 bp, Homo sapiens
cggtcccgggcctgcggggaccgggt

SEQ ID NO: 116299 - DNA, 26 bp, Homo sapiens
ggtcccgggcctgcggggaccgggtg

SEQ ID NO: 116300 - DNA, 26 bp, Homo sapiens
gtcccgggcctgcggggaccgggtgg

SEQ ID NO: 116301 - DNA, 26 bp, Homo sapiens
tcccgggcctgcggggaccgggtggc

SEQ ID NO: 116302 - DNA, 26 bp, Homo sapiens
cccgggcctgcggggaccgggtggcc

SEQ ID NO: 116303 - DNA, 26 bp, Homo sapiens
ccgggcctgcggggaccgggtggccc

SEQ ID NO: 116304 - DNA, 26 bp, Homo sapiens
cgggcctgcggggaccgggtggcccc

SEQ ID NO: 116305 - DNA, 26 bp, Homo sapiens
gggcctgcggggaccgggtggccccg

SEQ ID NO: 116306 - DNA, 26 bp, Homo sapiens
ggcctgcggggaccgggtggccccgg

SEQ ID NO: 116307 - DNA, 26 bp, Homo sapiens
gcctgcggggaccgggtggccccggt

SEQ ID NO: 116308 - DNA, 26 bp, Homo sapiens
cctgcggggaccgggtggccccggtg

SEQ ID NO: 116309 - DNA, 26 bp, Homo sapiens
ctgcggggaccgggtggccccggtgc

SEQ ID NO: 116310 - DNA, 26 bp, Homo sapiens
tgcggggaccgggtggccccggtgct

SEQ ID NO: 116311 - DNA, 26 bp, Homo sapiens
gcggggaccgggtggccccggtgctc

SEQ ID NO: 116312 - DNA, 26 bp, Homo sapiens
cggggaccgggtggccccggtgctct

SEQ ID NO: 116313 - DNA, 26 bp, Homo sapiens
ggggaccgggtggccccggtgctctg

SEQ ID NO: 116314 - DNA, 26 bp, Homo sapiens
gggaccgggtggccccggtgctctgg

SEQ ID NO: 116315 - DNA, 26 bp, Homo sapiens
ggaccgggtggccccggtgctctggg

SEQ ID NO: 116316 - DNA, 26 bp, Homo sapiens
gaccgggtggccccggtgctctgggc

SEQ ID NO: 116317 - DNA, 26 bp, Homo sapiens
accgggtggccccggtgctctgggcc

SEQ ID NO: 116318 - DNA, 26 bp, Homo sapiens
ccgggtggccccggtgctctgggccg

SEQ ID NO: 116319 - DNA, 26 bp, Homo sapiens
cgggtggccccggtgctctgggccgc

SEQ ID NO: 116320 - DNA, 26 bp, Homo sapiens
gggtggccccggtgctctgggccgca

SEQ ID NO: 116321 - DNA, 26 bp, Homo sapiens
ggtggccccggtgctctgggccgcac

SEQ ID NO: 116322 - DNA, 26 bp, Homo sapiens
gtggccccggtgctctgggccgcacg

SEQ ID NO: 116323 - DNA, 26 bp, Homo sapiens
tggccccggtgctctgggccgcacgt

SEQ ID NO: 116324 - DNA, 26 bp, Homo sapiens
ggccccggtgctctgggccgcacgtg

SEQ ID NO: 116325 - DNA, 26 bp, Homo sapiens
gccccggtgctctgggccgcacgtgt

SEQ ID NO: 116326 - DNA, 26 bp, Homo sapiens
ccccggtgctctgggccgcacgtgtc

SEQ ID NO: 116327 - DNA, 26 bp, Homo sapiens
cccggtgctctgggccgcacgtgtcg

SEQ ID NO: 116328 - DNA, 26 bp, Homo sapiens
ccggtgctctgggccgcacgtgtcgc

SEQ ID NO: 116329 - DNA, 26 bp, Homo sapiens
cggtgctctgggccgcacgtgtcgcg

SEQ ID NO: 116330 - DNA, 26 bp, Homo sapiens
ggtgctctgggccgcacgtgtcgcgc

SEQ ID NO: 116331 - DNA, 26 bp, Homo sapiens
gtgctctgggccgcacgtgtcgcgct

SEQ ID NO: 116332 - DNA, 26 bp, Homo sapiens
tgctctgggccgcacgtgtcgcgctc

SEQ ID NO: 116333 - DNA, 26 bp, Homo sapiens
gctctgggccgcacgtgtcgcgctct

SEQ ID NO: 116334 - DNA, 26 bp, Homo sapiens
ctctgggccgcacgtgtcgcgctctc

SEQ ID NO: 116335 - DNA, 26 bp, Homo sapiens
tctgggccgcacgtgtcgcgctctcc

SEQ ID NO: 116336 - DNA, 26 bp, Homo sapiens
ctgggccgcacgtgtcgcgctctccg

SEQ ID NO: 116337 - DNA, 26 bp, Homo sapiens
tgggccgcacgtgtcgcgctctccgc

SEQ ID NO: 116338 - DNA, 26 bp, Homo sapiens
gggccgcacgtgtcgcgctctccgcg

SEQ ID NO: 116339 - DNA, 26 bp, Homo sapiens
ggccgcacgtgtcgcgctctccgcgc

SEQ ID NO: 116340 - DNA, 26 bp, Homo sapiens
gccgcacgtgtcgcgctctccgcgct

SEQ ID NO: 116341 - DNA, 26 bp, Homo sapiens
ccgcacgtgtcgcgctctccgcgctc

SEQ ID NO: 116342 - DNA, 26 bp, Homo sapiens
cgcacgtgtcgcgctctccgcgctct

SEQ ID NO: 116343 - DNA, 26 bp, Homo sapiens
gcacgtgtcgcgctctccgcgctctc

SEQ ID NO: 116344 - DNA, 26 bp, Homo sapiens
cacgtgtcgcgctctccgcgctctct

SEQ ID NO: 116345 - DNA, 26 bp, Homo sapiens
acgtgtcgcgctctccgcgctctctg

SEQ ID NO: 116346 - DNA, 26 bp, Homo sapiens
cgtgtcgcgctctccgcgctctctgc

SEQ ID NO: 116347 - DNA, 26 bp, Homo sapiens
gtgtcgcgctctccgcgctctctgcc

SEQ ID NO: 116348 - DNA, 26 bp, Homo sapiens
tgtcgcgctctccgcgctctctgccg

SEQ ID NO: 116349 - DNA, 26 bp, Homo sapiens
gtcgcgctctccgcgctctctgccgg

SEQ ID NO: 116350 - DNA, 26 bp, Homo sapiens
tcgcgctctccgcgctctctgccggc

SEQ ID NO: 116351 - DNA, 26 bp, Homo sapiens
cgcgctctccgcgctctctgccggcg

SEQ ID NO: 116352 - DNA, 26 bp, Homo sapiens
gcgctctccgcgctctctgccggcgc

SEQ ID NO: 116353 - DNA, 26 bp, Homo sapiens
cgctctccgcgctctctgccggcgct

SEQ ID NO: 116354 - DNA, 26 bp, Homo sapiens
gctctccgcgctctctgccggcgctc

SEQ ID NO: 116355 - DNA, 26 bp, Homo sapiens
ctctccgcgctctctgccggcgctcg

SEQ ID NO: 116356 - DNA, 26 bp, Homo sapiens
tctccgcgctctctgccggcgctcgg

SEQ ID NO: 116357 - DNA, 26 bp, Homo sapiens
ctccgcgctctctgccggcgctcggg

SEQ ID NO: 116358 - DNA, 26 bp, Homo sapiens
tccgcgctctctgccggcgctcgggc

SEQ ID NO: 116359 - DNA, 26 bp, Homo sapiens
ccgcgctctctgccggcgctcgggcg

SEQ ID NO: 116360 - DNA, 26 bp, Homo sapiens
cgcgctctctgccggcgctcgggcgt

SEQ ID NO: 116361 - DNA, 26 bp, Homo sapiens
gcgctctctgccggcgctcgggcgtt

SEQ ID NO: 116362 - DNA, 26 bp, Homo sapiens
cgctctctgccggcgctcgggcgttc

SEQ ID NO: 116363 - DNA, 26 bp, Homo sapiens
gctctctgccggcgctcgggcgttcc

SEQ ID NO: 116364 - DNA, 26 bp, Homo sapiens
ctctctgccggcgctcgggcgttccc

SEQ ID NO: 116365 - DNA, 26 bp, Homo sapiens
tctctgccggcgctcgggcgttcccg

SEQ ID NO: 116366 - DNA, 26 bp, Homo sapiens
ctctgccggcgctcgggcgttcccgg

SEQ ID NO: 116367 - DNA, 26 bp, Homo sapiens
tctgccggcgctcgggcgttcccggt

SEQ ID NO: 116368 - DNA, 26 bp, Homo sapiens
ctgccggcgctcgggcgttcccggtg

SEQ ID NO: 116369 - DNA, 26 bp, Homo sapiens
tgccggcgctcgggcgttcccggtgc

SEQ ID NO: 116370 - DNA, 26 bp, Homo sapiens
gccggcgctcgggcgttcccggtgcc

SEQ ID NO: 116371 - DNA, 26 bp, Homo sapiens
ccggcgctcgggcgttcccggtgcca

SEQ ID NO: 116372 - DNA, 26 bp, Homo sapiens
cggcgctcgggcgttcccggtgccag

SEQ ID NO: 116373 - DNA, 26 bp, Homo sapiens
ggcgctcgggcgttcccggtgccagc

SEQ ID NO: 116374 - DNA, 26 bp, Homo sapiens
gcgctcgggcgttcccggtgccagcg

SEQ ID NO: 116375 - DNA, 26 bp, Homo sapiens
cgctcgggcgttcccggtgccagcgc

SEQ ID NO: 116376 - DNA, 26 bp, Homo sapiens
gctcgggcgttcccggtgccagcgcc

SEQ ID NO: 116377 - DNA, 26 bp, Homo sapiens
ctcgggcgttcccggtgccagcgccc

SEQ ID NO: 116378 - DNA, 26 bp, Homo sapiens
tcgggcgttcccggtgccagcgcccg

SEQ ID NO: 116379 - DNA, 26 bp, Homo sapiens
cgggcgttcccggtgccagcgcccgc

SEQ ID NO: 116380 - DNA, 26 bp, Homo sapiens
gggcgttcccggtgccagcgcccgcc

SEQ ID NO: 116381 - DNA, 26 bp, Homo sapiens
ggcgttcccggtgccagcgcccgccc

SEQ ID NO: 116382 - DNA, 26 bp, Homo sapiens
gcgttcccggtgccagcgcccgccct

SEQ ID NO: 116383 - DNA, 26 bp, Homo sapiens
cgttcccggtgccagcgcccgccctc

SEQ ID NO: 116384 - DNA, 26 bp, Homo sapiens
gttcccggtgccagcgcccgccctcc

SEQ ID NO: 116385 - DNA, 26 bp, Homo sapiens
ttcccggtgccagcgcccgccctccc

SEQ ID NO: 116386 - DNA, 26 bp, Homo sapiens
tcccggtgccagcgcccgccctcccg

SEQ ID NO: 116387 - DNA, 26 bp, Homo sapiens
cccggtgccagcgcccgccctcccgc

SEQ ID NO: 116388 - DNA, 26 bp, Homo sapiens
ccggtgccagcgcccgccctcccgcc

SEQ ID NO: 116389 - DNA, 26 bp, Homo sapiens
cggtgccagcgcccgccctcccgcct

SEQ ID NO: 116390 - DNA, 26 bp, Homo sapiens
ggtgccagcgcccgccctcccgcctc

SEQ ID NO: 116391 - DNA, 26 bp, Homo sapiens
gtgccagcgcccgccctcccgcctcc

SEQ ID NO: 116392 - DNA, 26 bp, Homo sapiens
tgccagcgcccgccctcccgcctccg

SEQ ID NO: 116393 - DNA, 26 bp, Homo sapiens
gccagcgcccgccctcccgcctccgc

SEQ ID NO: 116394 - DNA, 26 bp, Homo sapiens
ccagcgcccgccctcccgcctccgcc

SEQ ID NO: 116395 - DNA, 26 bp, Homo sapiens
cagcgcccgccctcccgcctccgcct

SEQ ID NO: 116396 - DNA, 26 bp, Homo sapiens
agcgcccgccctcccgcctccgcctc

SEQ ID NO: 116397 - DNA, 26 bp, Homo sapiens
gcgcccgccctcccgcctccgcctcc

SEQ ID NO: 116398 - DNA, 26 bp, Homo sapiens
cgcccgccctcccgcctccgcctccc

SEQ ID NO: 116399 - DNA, 26 bp, Homo sapiens
gcccgccctcccgcctccgcctcccg

SEQ ID NO: 116400 - DNA, 26 bp, Homo sapiens
cccgccctcccgcctccgcctcccgc

SEQ ID NO: 116401 - DNA, 26 bp, Homo sapiens
ccgccctcccgcctccgcctcccgcc

SEQ ID NO: 116402 - DNA, 26 bp, Homo sapiens
cgccctcccgcctccgcctcccgcct

SEQ ID NO: 116403 - DNA, 26 bp, Homo sapiens
gccctcccgcctccgcctcccgcctc

SEQ ID NO: 116404 - DNA, 26 bp, Homo sapiens
ccctcccgcctccgcctcccgcctct

SEQ ID NO: 116405 - DNA, 26 bp, Homo sapiens
cctcccgcctccgcctcccgcctctg

SEQ ID NO: 116406 - DNA, 26 bp, Homo sapiens
ctcccgcctccgcctcccgcctctgc

SEQ ID NO: 116407 - DNA, 26 bp, Homo sapiens
tcccgcctccgcctcccgcctctgcg

SEQ ID NO: 116408 - DNA, 26 bp, Homo sapiens
cccgcctccgcctcccgcctctgcgc

SEQ ID NO: 116409 - DNA, 26 bp, Homo sapiens
ccgcctccgcctcccgcctctgcgcc

SEQ ID NO: 116410 - DNA, 26 bp, Homo sapiens
cgcctccgcctcccgcctctgcgcca

SEQ ID NO: 116411 - DNA, 26 bp, Homo sapiens
gcctccgcctcccgcctctgcgccac

SEQ ID NO: 116412 - DNA, 26 bp, Homo sapiens
cctccgcctcccgcctctgcgccacc

SEQ ID NO: 116413 - DNA, 26 bp, Homo sapiens
ctccgcctcccgcctctgcgccacca

SEQ ID NO: 116414 - DNA, 26 bp, Homo sapiens
tccgcctcccgcctctgcgccaccaa

SEQ ID NO: 116415 - DNA, 26 bp, Homo sapiens
ccgcctcccgcctctgcgccaccaac

SEQ ID NO: 116416 - DNA, 26 bp, Homo sapiens
cgcctcccgcctctgcgccaccaact

SEQ ID NO: 116417 - DNA, 26 bp, Homo sapiens
gcctcccgcctctgcgccaccaactc

SEQ ID NO: 116418 - DNA, 26 bp, Homo sapiens
cctcccgcctctgcgccaccaactcc

SEQ ID NO: 116419 - DNA, 26 bp, Homo sapiens
ctcccgcctctgcgccaccaactccg

SEQ ID NO: 116420 - DNA, 26 bp, Homo sapiens
tcccgcctctgcgccaccaactccgg

SEQ ID NO: 116421 - DNA, 26 bp, Homo sapiens
cccgcctctgcgccaccaactccggg

SEQ ID NO: 116422 - DNA, 26 bp, Homo sapiens
ccgcctctgcgccaccaactccgggg

SEQ ID NO: 116423 - DNA, 26 bp, Homo sapiens
cgcctctgcgccaccaactccggggt

SEQ ID NO: 116424 - DNA, 26 bp, Homo sapiens
gcctctgcgccaccaactccggggtg

SEQ ID NO: 116425 - DNA, 26 bp, Homo sapiens
cctctgcgccaccaactccggggtgg

SEQ ID NO: 116426 - DNA, 26 bp, Homo sapiens
ctctgcgccaccaactccggggtggg

SEQ ID NO: 116427 - DNA, 26 bp, Homo sapiens
tctgcgccaccaactccggggtgggc

SEQ ID NO: 116428 - DNA, 26 bp, Homo sapiens
ctgcgccaccaactccggggtgggcg

SEQ ID NO: 116429 - DNA, 26 bp, Homo sapiens
tgcgccaccaactccggggtgggcgc

SEQ ID NO: 116430 - DNA, 26 bp, Homo sapiens
gcgccaccaactccggggtgggcgcg

SEQ ID NO: 116431 - DNA, 26 bp, Homo sapiens
cgccaccaactccggggtgggcgcgg

SEQ ID NO: 116432 - DNA, 26 bp, Homo sapiens
gccaccaactccggggtgggcgcggg

SEQ ID NO: 116433 - DNA, 26 bp, Homo sapiens
ccaccaactccggggtgggcgcgggg

SEQ ID NO: 116434 - DNA, 26 bp, Homo sapiens
caccaactccggggtgggcgcgggga

SEQ ID NO: 116435 - DNA, 26 bp, Homo sapiens
accaactccggggtgggcgcggggag

SEQ ID NO: 116436 - DNA, 26 bp, Homo sapiens
ccaactccggggtgggcgcggggagc

SEQ ID NO: 116437 - DNA, 26 bp, Homo sapiens
caactccggggtgggcgcggggagct

SEQ ID NO: 116438 - DNA, 26 bp, Homo sapiens
aactccggggtgggcgcggggagctg

SEQ ID NO: 116439 - DNA, 26 bp, Homo sapiens
actccggggtgggcgcggggagctgg

SEQ ID NO: 116440 - DNA, 26 bp, Homo sapiens
ctccggggtgggcgcggggagctggc

SEQ ID NO: 116441 - DNA, 26 bp, Homo sapiens
tccggggtgggcgcggggagctggcg

SEQ ID NO: 116442 - DNA, 26 bp, Homo sapiens
ccggggtgggcgcggggagctggcgg

SEQ ID NO: 116443 - DNA, 26 bp, Homo sapiens
cggggtgggcgcggggagctggcggc

SEQ ID NO: 116444 - DNA, 26 bp, Homo sapiens
ggggtgggcgcggggagctggcggcg

SEQ ID NO: 116445 - DNA, 26 bp, Homo sapiens
gggtgggcgcggggagctggcggcga

SEQ ID NO: 116446 - DNA, 26 bp, Homo sapiens
ggtgggcgcggggagctggcggcgag

SEQ ID NO: 116447 - DNA, 26 bp, Homo sapiens
gtgggcgcggggagctggcggcgagt

SEQ ID NO: 116448 - DNA, 26 bp, Homo sapiens
tgggcgcggggagctggcggcgagtg

SEQ ID NO: 116449 - DNA, 26 bp, Homo sapiens
gggcgcggggagctggcggcgagtga

SEQ ID NO: 116450 - DNA, 26 bp, Homo sapiens
ggcgcggggagctggcggcgagtgag

SEQ ID NO: 116451 - DNA, 26 bp, Homo sapiens
gcgcggggagctggcggcgagtgagg

SEQ ID NO: 116452 - DNA, 26 bp, Homo sapiens
cgcggggagctggcggcgagtgagga

SEQ ID NO: 116453 - DNA, 26 bp, Homo sapiens
gcggggagctggcggcgagtgaggat

SEQ ID NO: 116454 - DNA, 26 bp, Homo sapiens
cggggagctggcggcgagtgaggatc

SEQ ID NO: 116455 - DNA, 26 bp, Homo sapiens
ggggagctggcggcgagtgaggatcg

SEQ ID NO: 116456 - DNA, 26 bp, Homo sapiens
gggagctggcggcgagtgaggatcgg

SEQ ID NO: 116457 - DNA, 26 bp, Homo sapiens
ggagctggcggcgagtgaggatcggg

SEQ ID NO: 116458 - DNA, 26 bp, Homo sapiens
gagctggcggcgagtgaggatcgggc

SEQ ID NO: 116459 - DNA, 26 bp, Homo sapiens
agctggcggcgagtgaggatcgggcc

SEQ ID NO: 116460 - DNA, 26 bp, Homo sapiens
gctggcggcgagtgaggatcgggccg

SEQ ID NO: 116461 - DNA, 26 bp, Homo sapiens
ctggcggcgagtgaggatcgggccgg

SEQ ID NO: 116462 - DNA, 26 bp, Homo sapiens
tggcggcgagtgaggatcgggccggg

SEQ ID NO: 116463 - DNA, 26 bp, Homo sapiens
ggcggcgagtgaggatcgggccgggg

SEQ ID NO: 116464 - DNA, 26 bp, Homo sapiens
gcggcgagtgaggatcgggccggggc

SEQ ID NO: 116465 - DNA, 26 bp, Homo sapiens
cggcgagtgaggatcgggccggggcg

SEQ ID NO: 116466 - DNA, 26 bp, Homo sapiens
ggcgagtgaggatcgggccggggcgg

SEQ ID NO: 116467 - DNA, 26 bp, Homo sapiens
gcgagtgaggatcgggccggggcggg

SEQ ID NO: 116468 - DNA, 26 bp, Homo sapiens
cgagtgaggatcgggccggggcgggg

SEQ ID NO: 116469 - DNA, 26 bp, Homo sapiens
gagtgaggatcgggccggggcggggg

SEQ ID NO: 116470 - DNA, 26 bp, Homo sapiens
agtgaggatcgggccggggcgggggt

SEQ ID NO: 116471 - DNA, 26 bp, Homo sapiens
gtgaggatcgggccggggcgggggtc

SEQ ID NO: 116472 - DNA, 26 bp, Homo sapiens
tgaggatcgggccggggcgggggtcg

SEQ ID NO: 116473 - DNA, 26 bp, Homo sapiens
gaggatcgggccggggcgggggtcgg

SEQ ID NO: 116474 - DNA, 26 bp, Homo sapiens
aggatcgggccggggcgggggtcggg

SEQ ID NO: 116475 - DNA, 26 bp, Homo sapiens
ggatcgggccggggcgggggtcgggg

SEQ ID NO: 116476 - DNA, 26 bp, Homo sapiens
gatcgggccggggcgggggtcggggc

SEQ ID NO: 116477 - DNA, 26 bp, Homo sapiens
atcgggccggggcgggggtcggggct

SEQ ID NO: 116478 - DNA, 26 bp, Homo sapiens
tcgggccggggcgggggtcggggctg

SEQ ID NO: 116479 - DNA, 26 bp, Homo sapiens
cgggccggggcgggggtcggggctgg

SEQ ID NO: 116480 - DNA, 26 bp, Homo sapiens
gggccggggcgggggtcggggctggg

SEQ ID NO: 116481 - DNA, 26 bp, Homo sapiens
ggccggggcgggggtcggggctgggc

SEQ ID NO: 116482 - DNA, 26 bp, Homo sapiens
gccggggcgggggtcggggctgggcg

SEQ ID NO: 116483 - DNA, 26 bp, Homo sapiens
ccggggcgggggtcggggctgggcgg

SEQ ID NO: 116484 - DNA, 26 bp, Homo sapiens
cggggcgggggtcggggctgggcggt

SEQ ID NO: 116485 - DNA, 26 bp, Homo sapiens
ggggcgggggtcggggctgggcggtg

SEQ ID NO: 116486 - DNA, 26 bp, Homo sapiens
gggcgggggtcggggctgggcggtgg

SEQ ID NO: 116487 - DNA, 26 bp, Homo sapiens
ggcgggggtcggggctgggcggtggc

SEQ ID NO: 116488 - DNA, 26 bp, Homo sapiens
gcgggggtcggggctgggcggtggcc

SEQ ID NO: 116489 - DNA, 26 bp, Homo sapiens
cgggggtcggggctgggcggtggccg

SEQ ID NO: 116490 - DNA, 26 bp, Homo sapiens
gggggtcggggctgggcggtggccgc

SEQ ID NO: 116491 - DNA, 26 bp, Homo sapiens
ggggtcggggctgggcggtggccgca

SEQ ID NO: 116492 - DNA, 26 bp, Homo sapiens
gggtcggggctgggcggtggccgcag

SEQ ID NO: 116493 - DNA, 26 bp, Homo sapiens
ggtcggggctgggcggtggccgcagg

SEQ ID NO: 116494 - DNA, 26 bp, Homo sapiens
gtcggggctgggcggtggccgcaggg

SEQ ID NO: 116495 - DNA, 26 bp, Homo sapiens
tcggggctgggcggtggccgcagggc

SEQ ID NO: 116496 - DNA, 26 bp, Homo sapiens
cggggctgggcggtggccgcagggcg

SEQ ID NO: 116497 - DNA, 26 bp, Homo sapiens
ggggctgggcggtggccgcagggcgg

SEQ ID NO: 116498 - DNA, 26 bp, Homo sapiens
gggctgggcggtggccgcagggcgga

SEQ ID NO: 116499 - DNA, 26 bp, Homo sapiens
ggctgggcggtggccgcagggcggag

SEQ ID NO: 116500 - DNA, 26 bp, Homo sapiens
gctgggcggtggccgcagggcggaga

SEQ ID NO: 116501 - DNA, 26 bp, Homo sapiens
ctgggcggtggccgcagggcggagag

SEQ ID NO: 116502 - DNA, 26 bp, Homo sapiens
tgggcggtggccgcagggcggagagg

SEQ ID NO: 116503 - DNA, 26 bp, Homo sapiens
gggcggtggccgcagggcggagagga

SEQ ID NO: 116504 - DNA, 26 bp, Homo sapiens
ggcggtggccgcagggcggagaggac

SEQ ID NO: 116505 - DNA, 26 bp, Homo sapiens
gcggtggccgcagggcggagaggact

SEQ ID NO: 116506 - DNA, 26 bp, Homo sapiens
cggtggccgcagggcggagaggactc

SEQ ID NO: 116507 - DNA, 26 bp, Homo sapiens
ggtggccgcagggcggagaggactcg

SEQ ID NO: 116508 - DNA, 26 bp, Homo sapiens
gtggccgcagggcggagaggactcgc

SEQ ID NO: 116509 - DNA, 26 bp, Homo sapiens
tggccgcagggcggagaggactcgct

SEQ ID NO: 116510 - DNA, 26 bp, Homo sapiens
ggccgcagggcggagaggactcgctt

SEQ ID NO: 116511 - DNA, 26 bp, Homo sapiens
gccgcagggcggagaggactcgcttc

SEQ ID NO: 116512 - DNA, 26 bp, Homo sapiens
ccgcagggcggagaggactcgcttct

SEQ ID NO: 116513 - DNA, 26 bp, Homo sapiens
cgcagggcggagaggactcgcttctc

SEQ ID NO: 116514 - DNA, 26 bp, Homo sapiens
gcagggcggagaggactcgcttctca

SEQ ID NO: 116515 - DNA, 26 bp, Homo sapiens
cagggcggagaggactcgcttctcag

SEQ ID NO: 116516 - DNA, 26 bp, Homo sapiens
agggcggagaggactcgcttctcagt

SEQ ID NO: 116517 - DNA, 26 bp, Homo sapiens
gggcggagaggactcgcttctcagtt

SEQ ID NO: 116518 - DNA, 26 bp, Homo sapiens
ggcggagaggactcgcttctcagttc

SEQ ID NO: 116519 - DNA, 26 bp, Homo sapiens
gcggagaggactcgcttctcagttca

SEQ ID NO: 116520 - DNA, 26 bp, Homo sapiens
cggagaggactcgcttctcagttcag

SEQ ID NO: 116521 - DNA, 26 bp, Homo sapiens
ggagaggactcgcttctcagttcagc

SEQ ID NO: 116522 - DNA, 26 bp, Homo sapiens
gagaggactcgcttctcagttcagct

SEQ ID NO: 116523 - DNA, 26 bp, Homo sapiens
agaggactcgcttctcagttcagctc

SEQ ID NO: 116524 - DNA, 26 bp, Homo sapiens
gaggactcgcttctcagttcagctct

SEQ ID NO: 116525 - DNA, 26 bp, Homo sapiens
aggactcgcttctcagttcagctctg

SEQ ID NO: 116526 - DNA, 26 bp, Homo sapiens
ggactcgcttctcagttcagctctgg

SEQ ID NO: 116527 - DNA, 26 bp, Homo sapiens
gactcgcttctcagttcagctctgga

SEQ ID NO: 116528 - DNA, 26 bp, Homo sapiens
actcgcttctcagttcagctctggaa

SEQ ID NO: 116529 - DNA, 26 bp, Homo sapiens
ctcgcttctcagttcagctctggaag

SEQ ID NO: 116530 - DNA, 26 bp, Homo sapiens
tcgcttctcagttcagctctggaagc

SEQ ID NO: 116531 - DNA, 26 bp, Homo sapiens
cgcttctcagttcagctctggaagcg

SEQ ID NO: 116532 - DNA, 26 bp, Homo sapiens
gcttctcagttcagctctggaagcgc

SEQ ID NO: 116533 - DNA, 26 bp, Homo sapiens
cttctcagttcagctctggaagcgca

SEQ ID NO: 116534 - DNA, 26 bp, Homo sapiens
ttctcagttcagctctggaagcgcag

SEQ ID NO: 116535 - DNA, 26 bp, Homo sapiens
tctcagttcagctctggaagcgcagc

SEQ ID NO: 116536 - DNA, 26 bp, Homo sapiens
ctcagttcagctctggaagcgcagcc

SEQ ID NO: 116537 - DNA, 26 bp, Homo sapiens
tcagttcagctctggaagcgcagccg

SEQ ID NO: 116538 - DNA, 26 bp, Homo sapiens
cagttcagctctggaagcgcagccgg

SEQ ID NO: 116539 - DNA, 26 bp, Homo sapiens
agttcagctctggaagcgcagccggg

SEQ ID NO: 116540 - DNA, 26 bp, Homo sapiens
gttcagctctggaagcgcagccgggc

SEQ ID NO: 116541 - DNA, 26 bp, Homo sapiens
ttcagctctggaagcgcagccgggcg

SEQ ID NO: 116542 - DNA, 26 bp, Homo sapiens
tcagctctggaagcgcagccgggcgg

SEQ ID NO: 116543 - DNA, 26 bp, Homo sapiens
cagctctggaagcgcagccgggcggg

SEQ ID NO: 116544 - DNA, 26 bp, Homo sapiens
agctctggaagcgcagccgggcgggc

SEQ ID NO: 116545 - DNA, 26 bp, Homo sapiens
gctctggaagcgcagccgggcgggcg

SEQ ID NO: 116546 - DNA, 26 bp, Homo sapiens
ctctggaagcgcagccgggcgggcgc

SEQ ID NO: 116547 - DNA, 26 bp, Homo sapiens
tctggaagcgcagccgggcgggcgcc

SEQ ID NO: 116548 - DNA, 26 bp, Homo sapiens
ctggaagcgcagccgggcgggcgccc

SEQ ID NO: 116549 - DNA, 26 bp, Homo sapiens
tggaagcgcagccgggcgggcgcccg

SEQ ID NO: 116550 - DNA, 26 bp, Homo sapiens
ggaagcgcagccgggcgggcgcccgt

SEQ ID NO: 116551 - DNA, 26 bp, Homo sapiens
gaagcgcagccgggcgggcgcccgtg

SEQ ID NO: 116552 - DNA, 26 bp, Homo sapiens
aagcgcagccgggcgggcgcccgtgg

SEQ ID NO: 116553 - DNA, 26 bp, Homo sapiens
agcgcagccgggcgggcgcccgtggt

SEQ ID NO: 116554 - DNA, 26 bp, Homo sapiens
gcgcagccgggcgggcgcccgtggtt

SEQ ID NO: 116555 - DNA, 26 bp, Homo sapiens
cgcagccgggcgggcgcccgtggttt

SEQ ID NO: 116556 - DNA, 26 bp, Homo sapiens
gcagccgggcgggcgcccgtggtttc

SEQ ID NO: 116557 - DNA, 26 bp, Homo sapiens
cagccgggcgggcgcccgtggtttcc

SEQ ID NO: 116558 - DNA, 26 bp, Homo sapiens
agccgggcgggcgcccgtggtttcca

SEQ ID NO: 116559 - DNA, 26 bp, Homo sapiens
gccgggcgggcgcccgtggtttccac

SEQ ID NO: 116560 - DNA, 26 bp, Homo sapiens
ccgggcgggcgcccgtggtttccacc

SEQ ID NO: 116561 - DNA, 26 bp, Homo sapiens
cgggcgggcgcccgtggtttccaccc

SEQ ID NO: 116562 - DNA, 26 bp, Homo sapiens
gggcgggcgcccgtggtttccacccc

SEQ ID NO: 116563 - DNA, 26 bp, Homo sapiens
ggcgggcgcccgtggtttccaccccg

SEQ ID NO: 116564 - DNA, 26 bp, Homo sapiens
gcgggcgcccgtggtttccaccccgc

SEQ ID NO: 116565 - DNA, 26 bp, Homo sapiens
cgggcgcccgtggtttccaccccgcg

SEQ ID NO: 116566 - DNA, 26 bp, Homo sapiens
gggcgcccgtggtttccaccccgcgg

SEQ ID NO: 116567 - DNA, 26 bp, Homo sapiens
ggcgcccgtggtttccaccccgcggg

SEQ ID NO: 116568 - DNA, 26 bp, Homo sapiens
gcgcccgtggtttccaccccgcgggt

SEQ ID NO: 116569 - DNA, 26 bp, Homo sapiens
cgcccgtggtttccaccccgcgggtc

SEQ ID NO: 116570 - DNA, 26 bp, Homo sapiens
gcccgtggtttccaccccgcgggtcg

SEQ ID NO: 116571 - DNA, 26 bp, Homo sapiens
cccgtggtttccaccccgcgggtcga

SEQ ID NO: 116572 - DNA, 26 bp, Homo sapiens
ccgtggtttccaccccgcgggtcgaa

SEQ ID NO: 116573 - DNA, 26 bp, Homo sapiens
cgtggtttccaccccgcgggtcgaag

SEQ ID NO: 116574 - DNA, 26 bp, Homo sapiens
gtggtttccaccccgcgggtcgaagc

SEQ ID NO: 116575 - DNA, 26 bp, Homo sapiens
tggtttccaccccgcgggtcgaagcg

SEQ ID NO: 116576 - DNA, 26 bp, Homo sapiens
ggtttccaccccgcgggtcgaagcgg

SEQ ID NO: 116577 - DNA, 26 bp, Homo sapiens
gtttccaccccgcgggtcgaagcggg

SEQ ID NO: 116578 - DNA, 26 bp, Homo sapiens
tttccaccccgcgggtcgaagcgggc

SEQ ID NO: 116579 - DNA, 26 bp, Homo sapiens
ttccaccccgcgggtcgaagcgggct

SEQ ID NO: 116580 - DNA, 26 bp, Homo sapiens
tccaccccgcgggtcgaagcgggctc

SEQ ID NO: 116581 - DNA, 26 bp, Homo sapiens
ccaccccgcgggtcgaagcgggctcg

SEQ ID NO: 116582 - DNA, 26 bp, Homo sapiens
caccccgcgggtcgaagcgggctcgg

SEQ ID NO: 116583 - DNA, 26 bp, Homo sapiens
accccgcgggtcgaagcgggctcggg

SEQ ID NO: 116584 - DNA, 26 bp, Homo sapiens
ccccgcgggtcgaagcgggctcgggt

SEQ ID NO: 116585 - DNA, 26 bp, Homo sapiens
cccgcgggtcgaagcgggctcgggtg

SEQ ID NO: 116586 - DNA, 26 bp, Homo sapiens
ccgcgggtcgaagcgggctcgggtgg

SEQ ID NO: 116587 - DNA, 26 bp, Homo sapiens
cgcgggtcgaagcgggctcgggtggg

SEQ ID NO: 116588 - DNA, 26 bp, Homo sapiens
gcgggtcgaagcgggctcgggtggga

SEQ ID NO: 116589 - DNA, 26 bp, Homo sapiens
cgggtcgaagcgggctcgggtgggat

SEQ ID NO: 116590 - DNA, 26 bp, Homo sapiens
gggtcgaagcgggctcgggtgggatt

SEQ ID NO: 116591 - DNA, 26 bp, Homo sapiens
ggtcgaagcgggctcgggtgggattc

SEQ ID NO: 116592 - DNA, 26 bp, Homo sapiens
gtcgaagcgggctcgggtgggattct

SEQ ID NO: 116593 - DNA, 26 bp, Homo sapiens
tcgaagcgggctcgggtgggattctg

SEQ ID NO: 116594 - DNA, 26 bp, Homo sapiens
cgaagcgggctcgggtgggattctgc

SEQ ID NO: 116595 - DNA, 26 bp, Homo sapiens
gaagcgggctcgggtgggattctgcc

SEQ ID NO: 116596 - DNA, 26 bp, Homo sapiens
aagcgggctcgggtgggattctgcca

SEQ ID NO: 116597 - DNA, 26 bp, Homo sapiens
agcgggctcgggtgggattctgccac

SEQ ID NO: 116598 - DNA, 26 bp, Homo sapiens
gcgggctcgggtgggattctgccacc

SEQ ID NO: 116599 - DNA, 26 bp, Homo sapiens
cgggctcgggtgggattctgccacct

SEQ ID NO: 116600 - DNA, 26 bp, Homo sapiens
gggctcgggtgggattctgccacctg

SEQ ID NO: 116601 - DNA, 26 bp, Homo sapiens
ggctcgggtgggattctgccacctgt

SEQ ID NO: 116602 - DNA, 26 bp, Homo sapiens
gctcgggtgggattctgccacctgtg

SEQ ID NO: 116603 - DNA, 26 bp, Homo sapiens
ctcgggtgggattctgccacctgtgg

SEQ ID NO: 116604 - DNA, 26 bp, Homo sapiens
tcgggtgggattctgccacctgtggg

SEQ ID NO: 116605 - DNA, 26 bp, Homo sapiens
cgggtgggattctgccacctgtgggc

SEQ ID NO: 116606 - DNA, 26 bp, Homo sapiens
gggtgggattctgccacctgtgggct

SEQ ID NO: 116607 - DNA, 26 bp, Homo sapiens
ggtgggattctgccacctgtgggctc

SEQ ID NO: 116608 - DNA, 26 bp, Homo sapiens
gtgggattctgccacctgtgggctct

SEQ ID NO: 116609 - DNA, 26 bp, Homo sapiens
tgggattctgccacctgtgggctctg

SEQ ID NO: 116610 - DNA, 26 bp, Homo sapiens
gggattctgccacctgtgggctctgc

SEQ ID NO: 116611 - DNA, 26 bp, Homo sapiens
ggattctgccacctgtgggctctgct

SEQ ID NO: 116612 - DNA, 26 bp, Homo sapiens
gattctgccacctgtgggctctgctg

SEQ ID NO: 116613 - DNA, 26 bp, Homo sapiens
attctgccacctgtgggctctgctgt

SEQ ID NO: 116614 - DNA, 26 bp, Homo sapiens
ttctgccacctgtgggctctgctgtg

SEQ ID NO: 116615 - DNA, 26 bp, Homo sapiens
tctgccacctgtgggctctgctgtgt

SEQ ID NO: 116616 - DNA, 26 bp, Homo sapiens
ctgccacctgtgggctctgctgtgtc

SEQ ID NO: 116617 - DNA, 26 bp, Homo sapiens
tgccacctgtgggctctgctgtgtcg

SEQ ID NO: 116618 - DNA, 26 bp, Homo sapiens
gccacctgtgggctctgctgtgtcgc

SEQ ID NO: 116619 - DNA, 26 bp, Homo sapiens
ccacctgtgggctctgctgtgtcgcc

SEQ ID NO: 116620 - DNA, 26 bp, Homo sapiens
cacctgtgggctctgctgtgtcgcct

SEQ ID NO: 116621 - DNA, 26 bp, Homo sapiens
acctgtgggctctgctgtgtcgcctt

SEQ ID NO: 116622 - DNA, 26 bp, Homo sapiens
cctgtgggctctgctgtgtcgccttg

SEQ ID NO: 116623 - DNA, 26 bp, Homo sapiens
ctgtgggctctgctgtgtcgccttga

SEQ ID NO: 116624 - DNA, 26 bp, Homo sapiens
tgtgggctctgctgtgtcgccttgag

SEQ ID NO: 116625 - DNA, 26 bp, Homo sapiens
gtgggctctgctgtgtcgccttgagc

SEQ ID NO: 116626 - DNA, 26 bp, Homo sapiens
tgggctctgctgtgtcgccttgagca

SEQ ID NO: 116627 - DNA, 26 bp, Homo sapiens
gggctctgctgtgtcgccttgagcaa

SEQ ID NO: 116628 - DNA, 26 bp, Homo sapiens
ggctctgctgtgtcgccttgagcaag

SEQ ID NO: 116629 - DNA, 26 bp, Homo sapiens
gctctgctgtgtcgccttgagcaaga

SEQ ID NO: 116630 - DNA, 26 bp, Homo sapiens
ctctgctgtgtcgccttgagcaagat

SEQ ID NO: 116631 - DNA, 26 bp, Homo sapiens
tctgctgtgtcgccttgagcaagata

SEQ ID NO: 116632 - DNA, 26 bp, Homo sapiens
ctgctgtgtcgccttgagcaagataa

SEQ ID NO: 116633 - DNA, 26 bp, Homo sapiens
tgctgtgtcgccttgagcaagataat

SEQ ID NO: 116634 - DNA, 26 bp, Homo sapiens
gctgtgtcgccttgagcaagataatt

SEQ ID NO: 116635 - DNA, 26 bp, Homo sapiens
ctgtgtcgccttgagcaagataattc

SEQ ID NO: 116636 - DNA, 26 bp, Homo sapiens
tgtgtcgccttgagcaagataattct

SEQ ID NO: 116637 - DNA, 26 bp, Homo sapiens
gtgtcgccttgagcaagataattctc

SEQ ID NO: 116638 - DNA, 26 bp, Homo sapiens
tgtcgccttgagcaagataattctct

SEQ ID NO: 116639 - DNA, 26 bp, Homo sapiens
gtcgccttgagcaagataattctctc

SEQ ID NO: 116640 - DNA, 26 bp, Homo sapiens
tcgccttgagcaagataattctctct

SEQ ID NO: 116641 - DNA, 26 bp, Homo sapiens
cgccttgagcaagataattctctctc

SEQ ID NO: 116642 - DNA, 26 bp, Homo sapiens
gccttgagcaagataattctctctcc

SEQ ID NO: 116643 - DNA, 26 bp, Homo sapiens
ccttgagcaagataattctctctcca

SEQ ID NO: 116644 - DNA, 26 bp, Homo sapiens
cttgagcaagataattctctctccac

SEQ ID NO: 116645 - DNA, 26 bp, Homo sapiens
ttgagcaagataattctctctccacc

SEQ ID NO: 116646 - DNA, 26 bp, Homo sapiens
tgagcaagataattctctctccaccg

SEQ ID NO: 116647 - DNA, 26 bp, Homo sapiens
gagcaagataattctctctccaccgt

SEQ ID NO: 116648 - DNA, 26 bp, Homo sapiens
agcaagataattctctctccaccgtc

SEQ ID NO: 116649 - DNA, 26 bp, Homo sapiens
gcaagataattctctctccaccgtca

SEQ ID NO: 116650 - DNA, 26 bp, Homo sapiens
caagataattctctctccaccgtcag

SEQ ID NO: 116651 - DNA, 26 bp, Homo sapiens
aagataattctctctccaccgtcagt

SEQ ID NO: 116652 - DNA, 26 bp, Homo sapiens
agataattctctctccaccgtcagtt

SEQ ID NO: 116653 - DNA, 26 bp, Homo sapiens
gataattctctctccaccgtcagttt

SEQ ID NO: 116654 - DNA, 26 bp, Homo sapiens
ataattctctctccaccgtcagtttc

SEQ ID NO: 116655 - DNA, 26 bp, Homo sapiens
taattctctctccaccgtcagtttcc

SEQ ID NO: 116656 - DNA, 26 bp, Homo sapiens
aattctctctccaccgtcagtttccc

SEQ ID NO: 116657 - DNA, 26 bp, Homo sapiens
attctctctccaccgtcagtttcccc

SEQ ID NO: 116658 - DNA, 26 bp, Homo sapiens
ttctctctccaccgtcagtttcccct

SEQ ID NO: 116659 - DNA, 26 bp, Homo sapiens
tctctctccaccgtcagtttcccctc

SEQ ID NO: 116660 - DNA, 26 bp, Homo sapiens
ctctctccaccgtcagtttcccctca

SEQ ID NO: 116661 - DNA, 26 bp, Homo sapiens
tctctccaccgtcagtttcccctcat

SEQ ID NO: 116662 - DNA, 26 bp, Homo sapiens
ctctccaccgtcagtttcccctcata

SEQ ID NO: 116663 - DNA, 26 bp, Homo sapiens
tctccaccgtcagtttcccctcatat

SEQ ID NO: 116664 - DNA, 26 bp, Homo sapiens
ctccaccgtcagtttcccctcatata

SEQ ID NO: 116665 - DNA, 26 bp, Homo sapiens
tccaccgtcagtttcccctcatataa

SEQ ID NO: 116666 - DNA, 26 bp, Homo sapiens
ccaccgtcagtttcccctcatataaa

SEQ ID NO: 116667 - DNA, 26 bp, Homo sapiens
caccgtcagtttcccctcatataaaa

SEQ ID NO: 116668 - DNA, 26 bp, Homo sapiens
accgtcagtttcccctcatataaaat

SEQ ID NO: 116669 - DNA, 26 bp, Homo sapiens
ccgtcagtttcccctcatataaaatg

SEQ ID NO: 116670 - DNA, 26 bp, Homo sapiens
cgtcagtttcccctcatataaaatgc

SEQ ID NO: 116671 - DNA, 26 bp, Homo sapiens
gtcagtttcccctcatataaaatgcg

SEQ ID NO: 116672 - DNA, 26 bp, Homo sapiens
tcagtttcccctcatataaaatgcgg

SEQ ID NO: 116673 - DNA, 26 bp, Homo sapiens
cagtttcccctcatataaaatgcgga

SEQ ID NO: 116674 - DNA, 26 bp, Homo sapiens
agtttcccctcatataaaatgcggat

SEQ ID NO: 116675 - DNA, 26 bp, Homo sapiens
gtttcccctcatataaaatgcggata

SEQ ID NO: 116676 - DNA, 26 bp, Homo sapiens
tttcccctcatataaaatgcggataa

SEQ ID NO: 116677 - DNA, 26 bp, Homo sapiens
ttcccctcatataaaatgcggataat

SEQ ID NO: 116678 - DNA, 26 bp, Homo sapiens
tcccctcatataaaatgcggataata

SEQ ID NO: 116679 - DNA, 26 bp, Homo sapiens
cccctcatataaaatgcggataataa

SEQ ID NO: 116680 - DNA, 26 bp, Homo sapiens
ccctcatataaaatgcggataataaa

SEQ ID NO: 116681 - DNA, 26 bp, Homo sapiens
cctcatataaaatgcggataataaag

SEQ ID NO: 116682 - DNA, 26 bp, Homo sapiens
ctcatataaaatgcggataataaagc

SEQ ID NO: 116683 - DNA, 26 bp, Homo sapiens
tcatataaaatgcggataataaagcc

SEQ ID NO: 116684 - DNA, 26 bp, Homo sapiens
catataaaatgcggataataaagcct

SEQ ID NO: 116685 - DNA, 26 bp, Homo sapiens
atataaaatgcggataataaagcctg

SEQ ID NO: 116686 - DNA, 26 bp, Homo sapiens
tataaaatgcggataataaagcctgt

SEQ ID NO: 116687 - DNA, 26 bp, Homo sapiens
ataaaatgcggataataaagcctgtc

SEQ ID NO: 116688 - DNA, 26 bp, Homo sapiens
taaaatgcggataataaagcctgtct

SEQ ID NO: 116689 - DNA, 26 bp, Homo sapiens
aaaatgcggataataaagcctgtctc

SEQ ID NO: 116690 - DNA, 26 bp, Homo sapiens
aaatgcggataataaagcctgtctca

SEQ ID NO: 116691 - DNA, 26 bp, Homo sapiens
aatgcggataataaagcctgtctcat

SEQ ID NO: 116692 - DNA, 26 bp, Homo sapiens
atgcggataataaagcctgtctcata

SEQ ID NO: 116693 - DNA, 26 bp, Homo sapiens
tgcggataataaagcctgtctcataa

SEQ ID NO: 116694 - DNA, 26 bp, Homo sapiens
gcggataataaagcctgtctcataag

SEQ ID NO: 116695 - DNA, 26 bp, Homo sapiens
cggataataaagcctgtctcataaga

SEQ ID NO: 116696 - DNA, 26 bp, Homo sapiens
ggataataaagcctgtctcataagac

SEQ ID NO: 116697 - DNA, 26 bp, Homo sapiens
gataataaagcctgtctcataagacg

SEQ ID NO: 116698 - DNA, 26 bp, Homo sapiens
ataataaagcctgtctcataagacgg

SEQ ID NO: 116699 - DNA, 26 bp, Homo sapiens
taataaagcctgtctcataagacgga

SEQ ID NO: 116700 - DNA, 26 bp, Homo sapiens
aataaagcctgtctcataagacggag

SEQ ID NO: 116701 - DNA, 26 bp, Homo sapiens
ataaagcctgtctcataagacggagc

SEQ ID NO: 116702 - DNA, 26 bp, Homo sapiens
taaagcctgtctcataagacggagca

SEQ ID NO: 116703 - DNA, 26 bp, Homo sapiens
aaagcctgtctcataagacggagcaa

SEQ ID NO: 116704 - DNA, 26 bp, Homo sapiens
aagcctgtctcataagacggagcaag

SEQ ID NO: 116705 - DNA, 26 bp, Homo sapiens
agcctgtctcataagacggagcaagg

SEQ ID NO: 116706 - DNA, 26 bp, Homo sapiens
gcctgtctcataagacggagcaaggg

SEQ ID NO: 116707 - DNA, 26 bp, Homo sapiens
cctgtctcataagacggagcaagggt

SEQ ID NO: 116708 - DNA, 26 bp, Homo sapiens
ctgtctcataagacggagcaagggtt

SEQ ID NO: 116709 - DNA, 26 bp, Homo sapiens
tgtctcataagacggagcaagggttg

SEQ ID NO: 116710 - DNA, 26 bp, Homo sapiens
gtctcataagacggagcaagggttga

SEQ ID NO: 116711 - DNA, 26 bp, Homo sapiens
tctcataagacggagcaagggttgac

SEQ ID NO: 116712 - DNA, 26 bp, Homo sapiens
ctcataagacggagcaagggttgacc

SEQ ID NO: 116713 - DNA, 26 bp, Homo sapiens
tcataagacggagcaagggttgaccg

SEQ ID NO: 116714 - DNA, 26 bp, Homo sapiens
cataagacggagcaagggttgaccga

SEQ ID NO: 116715 - DNA, 26 bp, Homo sapiens
ataagacggagcaagggttgaccgag

SEQ ID NO: 116716 - DNA, 26 bp, Homo sapiens
taagacggagcaagggttgaccgagg

SEQ ID NO: 116717 - DNA, 26 bp, Homo sapiens
aagacggagcaagggttgaccgaggt

SEQ ID NO: 116718 - DNA, 26 bp, Homo sapiens
agacggagcaagggttgaccgaggtg

SEQ ID NO: 116719 - DNA, 26 bp, Homo sapiens
gacggagcaagggttgaccgaggtga

SEQ ID NO: 116720 - DNA, 26 bp, Homo sapiens
acggagcaagggttgaccgaggtgag

SEQ ID NO: 116721 - DNA, 26 bp, Homo sapiens
cggagcaagggttgaccgaggtgagg

SEQ ID NO: 116722 - DNA, 26 bp, Homo sapiens
ggagcaagggttgaccgaggtgaggt

SEQ ID NO: 116723 - DNA, 26 bp, Homo sapiens
gagcaagggttgaccgaggtgaggtg

SEQ ID NO: 116724 - DNA, 26 bp, Homo sapiens
agcaagggttgaccgaggtgaggtgc

SEQ ID NO: 116725 - DNA, 26 bp, Homo sapiens
gcaagggttgaccgaggtgaggtgcg

SEQ ID NO: 116726 - DNA, 26 bp, Homo sapiens
caagggttgaccgaggtgaggtgcgt

SEQ ID NO: 116727 - DNA, 26 bp, Homo sapiens
aagggttgaccgaggtgaggtgcgtt

SEQ ID NO: 116728 - DNA, 26 bp, Homo sapiens
agggttgaccgaggtgaggtgcgttt

SEQ ID NO: 116729 - DNA, 26 bp, Homo sapiens
gggttgaccgaggtgaggtgcgttta

SEQ ID NO: 116730 - DNA, 26 bp, Homo sapiens
ggttgaccgaggtgaggtgcgtttat

SEQ ID NO: 116731 - DNA, 26 bp, Homo sapiens
gttgaccgaggtgaggtgcgtttatg

SEQ ID NO: 116732 - DNA, 26 bp, Homo sapiens
ttgaccgaggtgaggtgcgtttatgc

SEQ ID NO: 116733 - DNA, 26 bp, Homo sapiens
tgaccgaggtgaggtgcgtttatgca

SEQ ID NO: 116734 - DNA, 26 bp, Homo sapiens
gaccgaggtgaggtgcgtttatgcac

SEQ ID NO: 116735 - DNA, 26 bp, Homo sapiens
accgaggtgaggtgcgtttatgcacc

SEQ ID NO: 116736 - DNA, 26 bp, Homo sapiens
ccgaggtgaggtgcgtttatgcacca

SEQ ID NO: 116737 - DNA, 26 bp, Homo sapiens
cgaggtgaggtgcgtttatgcaccaa

SEQ ID NO: 116738 - DNA, 26 bp, Homo sapiens
gaggtgaggtgcgtttatgcaccaag

SEQ ID NO: 116739 - DNA, 26 bp, Homo sapiens
aggtgaggtgcgtttatgcaccaaga

SEQ ID NO: 116740 - DNA, 26 bp, Homo sapiens
ggtgaggtgcgtttatgcaccaagat

SEQ ID NO: 116741 - DNA, 26 bp, Homo sapiens
gtgaggtgcgtttatgcaccaagata

SEQ ID NO: 116742 - DNA, 26 bp, Homo sapiens
tgaggtgcgtttatgcaccaagatat

SEQ ID NO: 116743 - DNA, 26 bp, Homo sapiens
gaggtgcgtttatgcaccaagatatg

SEQ ID NO: 116744 - DNA, 26 bp, Homo sapiens
aggtgcgtttatgcaccaagatatga

SEQ ID NO: 116745 - DNA, 26 bp, Homo sapiens
ggtgcgtttatgcaccaagatatgat

SEQ ID NO: 116746 - DNA, 26 bp, Homo sapiens
gtgcgtttatgcaccaagatatgata

SEQ ID NO: 116747 - DNA, 26 bp, Homo sapiens
tgcgtttatgcaccaagatatgatag

SEQ ID NO: 116748 - DNA, 26 bp, Homo sapiens
gcgtttatgcaccaagatatgatagg

SEQ ID NO: 116749 - DNA, 26 bp, Homo sapiens
cgtttatgcaccaagatatgataggc

SEQ ID NO: 116750 - DNA, 26 bp, Homo sapiens
gtttatgcaccaagatatgataggcg

SEQ ID NO: 116751 - DNA, 26 bp, Homo sapiens
tttatgcaccaagatatgataggcgc

SEQ ID NO: 116752 - DNA, 26 bp, Homo sapiens
ttatgcaccaagatatgataggcgcg

SEQ ID NO: 116753 - DNA, 26 bp, Homo sapiens
tatgcaccaagatatgataggcgcga

SEQ ID NO: 116754 - DNA, 26 bp, Homo sapiens
atgcaccaagatatgataggcgcgat

SEQ ID NO: 116755 - DNA, 26 bp, Homo sapiens
tgcaccaagatatgataggcgcgata

SEQ ID NO: 116756 - DNA, 26 bp, Homo sapiens
gcaccaagatatgataggcgcgataa

SEQ ID NO: 116757 - DNA, 26 bp, Homo sapiens
caccaagatatgataggcgcgataaa

SEQ ID NO: 116758 - DNA, 26 bp, Homo sapiens
accaagatatgataggcgcgataaaa

SEQ ID NO: 116759 - DNA, 26 bp, Homo sapiens
ccaagatatgataggcgcgataaaat

SEQ ID NO: 116760 - DNA, 26 bp, Homo sapiens
caagatatgataggcgcgataaaatc

SEQ ID NO: 116761 - DNA, 26 bp, Homo sapiens
aagatatgataggcgcgataaaatcg

SEQ ID NO: 116762 - DNA, 26 bp, Homo sapiens
agatatgataggcgcgataaaatcgt

SEQ ID NO: 116763 - DNA, 26 bp, Homo sapiens
gatatgataggcgcgataaaatcgtg

SEQ ID NO: 116764 - DNA, 26 bp, Homo sapiens
atatgataggcgcgataaaatcgtgt

SEQ ID NO: 116765 - DNA, 26 bp, Homo sapiens
tatgataggcgcgataaaatcgtgtg

SEQ ID NO: 116766 - DNA, 26 bp, Homo sapiens
atgataggcgcgataaaatcgtgtgc

SEQ ID NO: 116767 - DNA, 26 bp, Homo sapiens
tgataggcgcgataaaatcgtgtgct

SEQ ID NO: 116768 - DNA, 26 bp, Homo sapiens
gataggcgcgataaaatcgtgtgctc

SEQ ID NO: 116769 - DNA, 26 bp, Homo sapiens
ataggcgcgataaaatcgtgtgctca

SEQ ID NO: 116770 - DNA, 26 bp, Homo sapiens
taggcgcgataaaatcgtgtgctcag

SEQ ID NO: 116771 - DNA, 26 bp, Homo sapiens
aggcgcgataaaatcgtgtgctcagc

SEQ ID NO: 116772 - DNA, 26 bp, Homo sapiens
ggcgcgataaaatcgtgtgctcagcg

SEQ ID NO: 116773 - DNA, 26 bp, Homo sapiens
gcgcgataaaatcgtgtgctcagcgt

SEQ ID NO: 116774 - DNA, 26 bp, Homo sapiens
cgcgataaaatcgtgtgctcagcgtt

SEQ ID NO: 116775 - DNA, 26 bp, Homo sapiens
gcgataaaatcgtgtgctcagcgttc

SEQ ID NO: 116776 - DNA, 26 bp, Homo sapiens
cgataaaatcgtgtgctcagcgttca

SEQ ID NO: 116777 - DNA, 26 bp, Homo sapiens
gataaaatcgtgtgctcagcgttcac

SEQ ID NO: 116778 - DNA, 26 bp, Homo sapiens
ataaaatcgtgtgctcagcgttcaca

SEQ ID NO: 116779 - DNA, 26 bp, Homo sapiens
taaaatcgtgtgctcagcgttcacag

SEQ ID NO: 116780 - DNA, 26 bp, Homo sapiens
aaaatcgtgtgctcagcgttcacagc

SEQ ID NO: 116781 - DNA, 26 bp, Homo sapiens
aaatcgtgtgctcagcgttcacagcc

SEQ ID NO: 116782 - DNA, 26 bp, Homo sapiens
aatcgtgtgctcagcgttcacagcca

SEQ ID NO: 116783 - DNA, 26 bp, Homo sapiens
atcgtgtgctcagcgttcacagccat

SEQ ID NO: 116784 - DNA, 26 bp, Homo sapiens
tcgtgtgctcagcgttcacagccata

SEQ ID NO: 116785 - DNA, 26 bp, Homo sapiens
cgtgtgctcagcgttcacagccatag

SEQ ID NO: 116786 - DNA, 26 bp, Homo sapiens
gtgtgctcagcgttcacagccataga

SEQ ID NO: 116787 - DNA, 26 bp, Homo sapiens
tgtgctcagcgttcacagccatagag

SEQ ID NO: 116788 - DNA, 26 bp, Homo sapiens
gtgctcagcgttcacagccatagaga

SEQ ID NO: 116789 - DNA, 26 bp, Homo sapiens
tgctcagcgttcacagccatagagac

SEQ ID NO: 116790 - DNA, 26 bp, Homo sapiens
gctcagcgttcacagccatagagacg

SEQ ID NO: 116791 - DNA, 26 bp, Homo sapiens
ctcagcgttcacagccatagagacgt

SEQ ID NO: 116792 - DNA, 26 bp, Homo sapiens
tcagcgttcacagccatagagacgtg

SEQ ID NO: 116793 - DNA, 26 bp, Homo sapiens
cagcgttcacagccatagagacgtgg

SEQ ID NO: 116794 - DNA, 26 bp, Homo sapiens
agcgttcacagccatagagacgtggc

SEQ ID NO: 116795 - DNA, 26 bp, Homo sapiens
gcgttcacagccatagagacgtggca

SEQ ID NO: 116796 - DNA, 26 bp, Homo sapiens
cgttcacagccatagagacgtggcac

SEQ ID NO: 116797 - DNA, 26 bp, Homo sapiens
gttcacagccatagagacgtggcact

SEQ ID NO: 116798 - DNA, 26 bp, Homo sapiens
ttcacagccatagagacgtggcactt

SEQ ID NO: 116799 - DNA, 26 bp, Homo sapiens
tcacagccatagagacgtggcacttt

SEQ ID NO: 116800 - DNA, 26 bp, Homo sapiens
cacagccatagagacgtggcactttg

SEQ ID NO: 116801 - DNA, 26 bp, Homo sapiens
acagccatagagacgtggcactttgt

SEQ ID NO: 116802 - DNA, 26 bp, Homo sapiens
cagccatagagacgtggcactttgtt

SEQ ID NO: 116803 - DNA, 26 bp, Homo sapiens
agccatagagacgtggcactttgttg

SEQ ID NO: 116804 - DNA, 26 bp, Homo sapiens
gccatagagacgtggcactttgttga

SEQ ID NO: 116805 - DNA, 26 bp, Homo sapiens
ccatagagacgtggcactttgttgac

SEQ ID NO: 116806 - DNA, 26 bp, Homo sapiens
catagagacgtggcactttgttgaca

SEQ ID NO: 116807 - DNA, 26 bp, Homo sapiens
atagagacgtggcactttgttgacag

SEQ ID NO: 116808 - DNA, 26 bp, Homo sapiens
tagagacgtggcactttgttgacagc

SEQ ID NO: 116809 - DNA, 26 bp, Homo sapiens
agagacgtggcactttgttgacagcc

SEQ ID NO: 116810 - DNA, 26 bp, Homo sapiens
gagacgtggcactttgttgacagcca

SEQ ID NO: 116811 - DNA, 26 bp, Homo sapiens
agacgtggcactttgttgacagccat

SEQ ID NO: 116812 - DNA, 26 bp, Homo sapiens
gacgtggcactttgttgacagccatc

SEQ ID NO: 116813 - DNA, 26 bp, Homo sapiens
acgtggcactttgttgacagccatca

SEQ ID NO: 116814 - DNA, 26 bp, Homo sapiens
cgtggcactttgttgacagccatcag

SEQ ID NO: 116815 - DNA, 26 bp, Homo sapiens
gtggcactttgttgacagccatcagg

SEQ ID NO: 116816 - DNA, 26 bp, Homo sapiens
tggcactttgttgacagccatcaggg

SEQ ID NO: 116817 - DNA, 26 bp, Homo sapiens
ggcactttgttgacagccatcaggga

SEQ ID NO: 116818 - DNA, 26 bp, Homo sapiens
gcactttgttgacagccatcagggaa

SEQ ID NO: 116819 - DNA, 26 bp, Homo sapiens
cactttgttgacagccatcagggaac

SEQ ID NO: 116820 - DNA, 26 bp, Homo sapiens
actttgttgacagccatcagggaact

SEQ ID NO: 116821 - DNA, 26 bp, Homo sapiens
ctttgttgacagccatcagggaactt

SEQ ID NO: 116822 - DNA, 26 bp, Homo sapiens
tttgttgacagccatcagggaacttt

SEQ ID NO: 116823 - DNA, 26 bp, Homo sapiens
ttgttgacagccatcagggaactttc

SEQ ID NO: 116824 - DNA, 26 bp, Homo sapiens
tgttgacagccatcagggaactttcc

SEQ ID NO: 116825 - DNA, 26 bp, Homo sapiens
gttgacagccatcagggaactttcct

SEQ ID NO: 116826 - DNA, 26 bp, Homo sapiens
ttgacagccatcagggaactttcctc

SEQ ID NO: 116827 - DNA, 26 bp, Homo sapiens
tgacagccatcagggaactttcctcg

SEQ ID NO: 116828 - DNA, 26 bp, Homo sapiens
gacagccatcagggaactttcctcgc

SEQ ID NO: 116829 - DNA, 26 bp, Homo sapiens
acagccatcagggaactttcctcgca

SEQ ID NO: 116830 - DNA, 26 bp, Homo sapiens
cagccatcagggaactttcctcgcag

SEQ ID NO: 116831 - DNA, 26 bp, Homo sapiens
agccatcagggaactttcctcgcaga

SEQ ID NO: 116832 - DNA, 26 bp, Homo sapiens
gccatcagggaactttcctcgcagat

SEQ ID NO: 116833 - DNA, 26 bp, Homo sapiens
ccatcagggaactttcctcgcagatg

SEQ ID NO: 116834 - DNA, 26 bp, Homo sapiens
catcagggaactttcctcgcagatgt

SEQ ID NO: 116835 - DNA, 26 bp, Homo sapiens
atcagggaactttcctcgcagatgtc

SEQ ID NO: 116836 - DNA, 26 bp, Homo sapiens
tcagggaactttcctcgcagatgtcc

SEQ ID NO: 116837 - DNA, 26 bp, Homo sapiens
cagggaactttcctcgcagatgtcct

SEQ ID NO: 116838 - DNA, 26 bp, Homo sapiens
agggaactttcctcgcagatgtcctt

SEQ ID NO: 116839 - DNA, 26 bp, Homo sapiens
gggaactttcctcgcagatgtccttt

SEQ ID NO: 116840 - DNA, 26 bp, Homo sapiens
ggaactttcctcgcagatgtcctttc

SEQ ID NO: 116841 - DNA, 26 bp, Homo sapiens
gaactttcctcgcagatgtcctttct

SEQ ID NO: 116842 - DNA, 26 bp, Homo sapiens
aactttcctcgcagatgtcctttctc

SEQ ID NO: 116843 - DNA, 26 bp, Homo sapiens
actttcctcgcagatgtcctttctct

SEQ ID NO: 116844 - DNA, 26 bp, Homo sapiens
ctttcctcgcagatgtcctttctctg

SEQ ID NO: 116845 - DNA, 26 bp, Homo sapiens
tttcctcgcagatgtcctttctctgt

SEQ ID NO: 116846 - DNA, 26 bp, Homo sapiens
ttcctcgcagatgtcctttctctgtg

SEQ ID NO: 116847 - DNA, 26 bp, Homo sapiens
tcctcgcagatgtcctttctctgtgc

SEQ ID NO: 116848 - DNA, 26 bp, Homo sapiens
cctcgcagatgtcctttctctgtgct

SEQ ID NO: 116849 - DNA, 26 bp, Homo sapiens
ctcgcagatgtcctttctctgtgctc

SEQ ID NO: 116850 - DNA, 26 bp, Homo sapiens
tcgcagatgtcctttctctgtgctct

SEQ ID NO: 116851 - DNA, 26 bp, Homo sapiens
cgcagatgtcctttctctgtgctctg

SEQ ID NO: 116852 - DNA, 26 bp, Homo sapiens
gcagatgtcctttctctgtgctctgc

SEQ ID NO: 116853 - DNA, 26 bp, Homo sapiens
cagatgtcctttctctgtgctctgca

SEQ ID NO: 116854 - DNA, 26 bp, Homo sapiens
tttgtgtgagcaataaagctttttaa

SEQ ID NO: 116855 - DNA, 26 bp, Homo sapiens
ttgtgtgagcaataaagctttttaat

SEQ ID NO: 116856 - DNA, 26 bp, Homo sapiens
tgtgtgagcaataaagctttttaatc

SEQ ID NO: 116857 - DNA, 26 bp, Homo sapiens
gtgtgagcaataaagctttttaatca

SEQ ID NO: 116858 - DNA, 26 bp, Homo sapiens
tgtgagcaataaagctttttaatcac

SEQ ID NO: 116859 - DNA, 26 bp, Homo sapiens
gtgagcaataaagctttttaatcacc

SEQ ID NO: 116860 - DNA, 26 bp, Homo sapiens
tgagcaataaagctttttaatcacct

SEQ ID NO: 116861 - DNA, 26 bp, Homo sapiens
gagcaataaagctttttaatcacctg

SEQ ID NO: 116862 - DNA, 26 bp, Homo sapiens
agcaataaagctttttaatcacctgg

SEQ ID NO: 116863 - DNA, 26 bp, Homo sapiens
gcaataaagctttttaatcacctggg

SEQ ID NO: 116864 - DNA, 26 bp, Homo sapiens
caataaagctttttaatcacctgggt

SEQ ID NO: 116865 - DNA, 26 bp, Homo sapiens
aataaagctttttaatcacctgggtg

SEQ ID NO: 116866 - DNA, 26 bp, Homo sapiens
ataaagctttttaatcacctgggtgc

SEQ ID NO: 116867 - DNA, 26 bp, Homo sapiens
taaagctttttaatcacctgggtgca

SEQ ID NO: 116868 - DNA, 26 bp, Homo sapiens
aaagctttttaatcacctgggtgcag

SEQ ID NO: 116869 - DNA, 26 bp, Homo sapiens
aagctttttaatcacctgggtgcagg

SEQ ID NO: 116870 - DNA, 26 bp, Homo sapiens
agctttttaatcacctgggtgcaggc

SEQ ID NO: 116871 - DNA, 26 bp, Homo sapiens
gctttttaatcacctgggtgcaggct

SEQ ID NO: 116872 - DNA, 26 bp, Homo sapiens
ctttttaatcacctgggtgcaggctg

SEQ ID NO: 116873 - DNA, 26 bp, Homo sapiens
tttttaatcacctgggtgcaggctgg

SEQ ID NO: 116874 - DNA, 26 bp, Homo sapiens
ttttaatcacctgggtgcaggctggc

SEQ ID NO: 116875 - DNA, 26 bp, Homo sapiens
tttaatcacctgggtgcaggctggct

SEQ ID NO: 116876 - DNA, 26 bp, Homo sapiens
ttaatcacctgggtgcaggctggctg

SEQ ID NO: 116877 - DNA, 26 bp, Homo sapiens
taatcacctgggtgcaggctggctga

SEQ ID NO: 116878 - DNA, 26 bp, Homo sapiens
aatcacctgggtgcaggctggctgag

SEQ ID NO: 116879 - DNA, 26 bp, Homo sapiens
atcacctgggtgcaggctggctgagt

SEQ ID NO: 116880 - DNA, 26 bp, Homo sapiens
tcacctgggtgcaggctggctgagtc

SEQ ID NO: 116881 - DNA, 26 bp, Homo sapiens
cacctgggtgcaggctggctgagtcc

SEQ ID NO: 116882 - DNA, 26 bp, Homo sapiens
acctgggtgcaggctggctgagtccg

SEQ ID NO: 116883 - DNA, 26 bp, Homo sapiens
cctgggtgcaggctggctgagtccga

SEQ ID NO: 116884 - DNA, 26 bp, Homo sapiens
ctgggtgcaggctggctgagtccgaa

SEQ ID NO: 116885 - DNA, 26 bp, Homo sapiens
tgggtgcaggctggctgagtccgaaa

SEQ ID NO: 116886 - DNA, 26 bp, Homo sapiens
gggtgcaggctggctgagtccgaaaa

SEQ ID NO: 116887 - DNA, 26 bp, Homo sapiens
ggtgcaggctggctgagtccgaaaag

SEQ ID NO: 116888 - DNA, 26 bp, Homo sapiens
gtgcaggctggctgagtccgaaaaga

SEQ ID NO: 116889 - DNA, 26 bp, Homo sapiens
tgcaggctggctgagtccgaaaagac

SEQ ID NO: 116890 - DNA, 26 bp, Homo sapiens
gcaggctggctgagtccgaaaagaca

SEQ ID NO: 116891 - DNA, 26 bp, Homo sapiens
caggctggctgagtccgaaaagacag

SEQ ID NO: 116892 - DNA, 26 bp, Homo sapiens
aggctggctgagtccgaaaagacagt

SEQ ID NO: 116893 - DNA, 26 bp, Homo sapiens
ggctggctgagtccgaaaagacagtc

SEQ ID NO: 116894 - DNA, 26 bp, Homo sapiens
gctggctgagtccgaaaagacagtca

SEQ ID NO: 116895 - DNA, 26 bp, Homo sapiens
ctggctgagtccgaaaagacagtcag

SEQ ID NO: 116896 - DNA, 26 bp, Homo sapiens
tggctgagtccgaaaagacagtcagt

SEQ ID NO: 116897 - DNA, 26 bp, Homo sapiens
ggctgagtccgaaaagacagtcagtg

SEQ ID NO: 116898 - DNA, 26 bp, Homo sapiens
gctgagtccgaaaagacagtcagtga

SEQ ID NO: 116899 - DNA, 26 bp, Homo sapiens
ctgagtccgaaaagacagtcagtgaa

SEQ ID NO: 116900 - DNA, 26 bp, Homo sapiens
tgagtccgaaaagacagtcagtgaag

SEQ ID NO: 116901 - DNA, 26 bp, Homo sapiens
gagtccgaaaagacagtcagtgaagg

SEQ ID NO: 116902 - DNA, 26 bp, Homo sapiens
agtccgaaaagacagtcagtgaaggg

SEQ ID NO: 116903 - DNA, 26 bp, Homo sapiens
gtccgaaaagacagtcagtgaaggga

SEQ ID NO: 116904 - DNA, 26 bp, Homo sapiens
tccgaaaagacagtcagtgaagggag

SEQ ID NO: 116905 - DNA, 26 bp, Homo sapiens
ccgaaaagacagtcagtgaagggaga

SEQ ID NO: 116906 - DNA, 26 bp, Homo sapiens
cgaaaagacagtcagtgaagggagat

SEQ ID NO: 116907 - DNA, 26 bp, Homo sapiens
gaaaagacagtcagtgaagggagata

SEQ ID NO: 116908 - DNA, 26 bp, Homo sapiens
aaaagacagtcagtgaagggagatag

SEQ ID NO: 116909 - DNA, 26 bp, Homo sapiens
aaagacagtcagtgaagggagatagg

SEQ ID NO: 116910 - DNA, 26 bp, Homo sapiens
aagacagtcagtgaagggagataggg

SEQ ID NO: 116911 - DNA, 26 bp, Homo sapiens
agacagtcagtgaagggagatagggt

SEQ ID NO: 116912 - DNA, 26 bp, Homo sapiens
gacagtcagtgaagggagatagggtt

SEQ ID NO: 116913 - DNA, 26 bp, Homo sapiens
acagtcagtgaagggagatagggttg

SEQ ID NO: 116914 - DNA, 26 bp, Homo sapiens
cagtcagtgaagggagatagggttgg

SEQ ID NO: 116915 - DNA, 26 bp, Homo sapiens
agtcagtgaagggagatagggttggg

SEQ ID NO: 116916 - DNA, 26 bp, Homo sapiens
gtcagtgaagggagatagggttggga

SEQ ID NO: 116917 - DNA, 26 bp, Homo sapiens
tcagtgaagggagatagggttgggac

SEQ ID NO: 116918 - DNA, 26 bp, Homo sapiens
cagtgaagggagatagggttgggacc

SEQ ID NO: 116919 - DNA, 26 bp, Homo sapiens
agtgaagggagatagggttgggacca

SEQ ID NO: 116920 - DNA, 26 bp, Homo sapiens
gtgaagggagatagggttgggaccat

SEQ ID NO: 116921 - DNA, 26 bp, Homo sapiens
tgaagggagatagggttgggaccatt

SEQ ID NO: 116922 - DNA, 26 bp, Homo sapiens
gaagggagatagggttgggaccattt

SEQ ID NO: 116923 - DNA, 26 bp, Homo sapiens
aagggagatagggttgggaccatttt

SEQ ID NO: 116924 - DNA, 26 bp, Homo sapiens
agggagatagggttgggaccatttta

SEQ ID NO: 116925 - DNA, 26 bp, Homo sapiens
gggagatagggttgggaccattttac

SEQ ID NO: 116926 - DNA, 26 bp, Homo sapiens
ggagatagggttgggaccattttaca

SEQ ID NO: 116927 - DNA, 26 bp, Homo sapiens
gagatagggttgggaccattttacag

SEQ ID NO: 116928 - DNA, 26 bp, Homo sapiens
agatagggttgggaccattttacagg

SEQ ID NO: 116929 - DNA, 26 bp, Homo sapiens
gatagggttgggaccattttacagga

SEQ ID NO: 116930 - DNA, 26 bp, Homo sapiens
atagggttgggaccattttacaggat

SEQ ID NO: 116931 - DNA, 26 bp, Homo sapiens
tagggttgggaccattttacaggatt

SEQ ID NO: 116932 - DNA, 26 bp, Homo sapiens
agggttgggaccattttacaggattt

SEQ ID NO: 116933 - DNA, 26 bp, Homo sapiens
gggttgggaccattttacaggatttg

SEQ ID NO: 116934 - DNA, 26 bp, Homo sapiens
ggttgggaccattttacaggatttgg

SEQ ID NO: 116935 - DNA, 26 bp, Homo sapiens
gttgggaccattttacaggatttggg

SEQ ID NO: 116936 - DNA, 26 bp, Homo sapiens
ttgggaccattttacaggatttgggt

SEQ ID NO: 116937 - DNA, 26 bp, Homo sapiens
tgggaccattttacaggatttgggtt

SEQ ID NO: 116938 - DNA, 26 bp, Homo sapiens
gggaccattttacaggatttgggttg

SEQ ID NO: 116939 - DNA, 26 bp, Homo sapiens
ggaccattttacaggatttgggttgg

SEQ ID NO: 116940 - DNA, 26 bp, Homo sapiens
gaccattttacaggatttgggttggt

SEQ ID NO: 116941 - DNA, 26 bp, Homo sapiens
accattttacaggatttgggttggta

SEQ ID NO: 116942 - DNA, 26 bp, Homo sapiens
ccattttacaggatttgggttggtaa

SEQ ID NO: 116943 - DNA, 26 bp, Homo sapiens
cattttacaggatttgggttggtaaa

SEQ ID NO: 116944 - DNA, 26 bp, Homo sapiens
attttacaggatttgggttggtaaag

SEQ ID NO: 116945 - DNA, 26 bp, Homo sapiens
ttttacaggatttgggttggtaaagg

SEQ ID NO: 116946 - DNA, 26 bp, Homo sapiens
tttacaggatttgggttggtaaagga

SEQ ID NO: 116947 - DNA, 26 bp, Homo sapiens
ttacaggatttgggttggtaaaggaa

SEQ ID NO: 116948 - DNA, 26 bp, Homo sapiens
tacaggatttgggttggtaaaggaaa

SEQ ID NO: 116949 - DNA, 26 bp, Homo sapiens
acaggatttgggttggtaaaggaaaa

SEQ ID NO: 116950 - DNA, 26 bp, Homo sapiens
caggatttgggttggtaaaggaaaat

SEQ ID NO: 116951 - DNA, 26 bp, Homo sapiens
aggatttgggttggtaaaggaaaatt

SEQ ID NO: 116952 - DNA, 26 bp, Homo sapiens
ggatttgggttggtaaaggaaaatta

SEQ ID NO: 116953 - DNA, 26 bp, Homo sapiens
gatttgggttggtaaaggaaaattac

SEQ ID NO: 116954 - DNA, 26 bp, Homo sapiens
atttgggttggtaaaggaaaattaca

SEQ ID NO: 116955 - DNA, 26 bp, Homo sapiens
tttgggttggtaaaggaaaattacag

SEQ ID NO: 116956 - DNA, 26 bp, Homo sapiens
ttgggttggtaaaggaaaattacagt

SEQ ID NO: 116957 - DNA, 26 bp, Homo sapiens
tgggttggtaaaggaaaattacagtc

SEQ ID NO: 116958 - DNA, 26 bp, Homo sapiens
gggttggtaaaggaaaattacagtca

SEQ ID NO: 116959 - DNA, 26 bp, Homo sapiens
ggttggtaaaggaaaattacagtcaa

SEQ ID NO: 116960 - DNA, 26 bp, Homo sapiens
gttggtaaaggaaaattacagtcaaa

SEQ ID NO: 116961 - DNA, 26 bp, Homo sapiens
ttggtaaaggaaaattacagtcaaag

SEQ ID NO: 116962 - DNA, 26 bp, Homo sapiens
tggtaaaggaaaattacagtcaaagg

SEQ ID NO: 116963 - DNA, 26 bp, Homo sapiens
ggtaaaggaaaattacagtcaaaggg

SEQ ID NO: 116964 - DNA, 26 bp, Homo sapiens
gtaaaggaaaattacagtcaaagggg

SEQ ID NO: 116965 - DNA, 26 bp, Homo sapiens
taaaggaaaattacagtcaaaggggg

SEQ ID NO: 116966 - DNA, 26 bp, Homo sapiens
aaaggaaaattacagtcaaagggggt

SEQ ID NO: 116967 - DNA, 26 bp, Homo sapiens
aaggaaaattacagtcaaagggggtt

SEQ ID NO: 116968 - DNA, 26 bp, Homo sapiens
aggaaaattacagtcaaagggggttg

SEQ ID NO: 116969 - DNA, 26 bp, Homo sapiens
ggaaaattacagtcaaagggggttgt

SEQ ID NO: 116970 - DNA, 26 bp, Homo sapiens
gaaaattacagtcaaagggggttgtt

SEQ ID NO: 116971 - DNA, 26 bp, Homo sapiens
aaaattacagtcaaagggggttgttc

SEQ ID NO: 116972 - DNA, 26 bp, Homo sapiens
aaattacagtcaaagggggttgttct

SEQ ID NO: 116973 - DNA, 26 bp, Homo sapiens
aattacagtcaaagggggttgttctc

SEQ ID NO: 116974 - DNA, 26 bp, Homo sapiens
attacagtcaaagggggttgttctct

SEQ ID NO: 116975 - DNA, 26 bp, Homo sapiens
ttacagtcaaagggggttgttctctg

SEQ ID NO: 116976 - DNA, 26 bp, Homo sapiens
tacagtcaaagggggttgttctctgg

SEQ ID NO: 116977 - DNA, 26 bp, Homo sapiens
acagtcaaagggggttgttctctggc

SEQ ID NO: 116978 - DNA, 26 bp, Homo sapiens
cagtcaaagggggttgttctctggcg

SEQ ID NO: 116979 - DNA, 26 bp, Homo sapiens
agtcaaagggggttgttctctggcgg

SEQ ID NO: 116980 - DNA, 26 bp, Homo sapiens
gtcaaagggggttgttctctggcggg

SEQ ID NO: 116981 - DNA, 26 bp, Homo sapiens
tcaaagggggttgttctctggcgggc

SEQ ID NO: 116982 - DNA, 26 bp, Homo sapiens
caaagggggttgttctctggcgggca

SEQ ID NO: 116983 - DNA, 26 bp, Homo sapiens
aaagggggttgttctctggcgggcag

SEQ ID NO: 116984 - DNA, 26 bp, Homo sapiens
aagggggttgttctctggcgggcaga

SEQ ID NO: 116985 - DNA, 26 bp, Homo sapiens
agggggttgttctctggcgggcagag

SEQ ID NO: 116986 - DNA, 26 bp, Homo sapiens
gggggttgttctctggcgggcagagg

SEQ ID NO: 116987 - DNA, 26 bp, Homo sapiens
ggggttgttctctggcgggcagaggt

SEQ ID NO: 116988 - DNA, 26 bp, Homo sapiens
gggttgttctctggcgggcagaggtg

SEQ ID NO: 116989 - DNA, 26 bp, Homo sapiens
ggttgttctctggcgggcagaggtgg

SEQ ID NO: 116990 - DNA, 26 bp, Homo sapiens
gttgttctctggcgggcagaggtggg

SEQ ID NO: 116991 - DNA, 26 bp, Homo sapiens
ttgttctctggcgggcagaggtgggt

SEQ ID NO: 116992 - DNA, 26 bp, Homo sapiens
tgttctctggcgggcagaggtgggtg

SEQ ID NO: 116993 - DNA, 26 bp, Homo sapiens
gttctctggcgggcagaggtgggtgt

SEQ ID NO: 116994 - DNA, 26 bp, Homo sapiens
ttctctggcgggcagaggtgggtgtc

SEQ ID NO: 116995 - DNA, 26 bp, Homo sapiens
tctctggcgggcagaggtgggtgtca

SEQ ID NO: 116996 - DNA, 26 bp, Homo sapiens
ctctggcgggcagaggtgggtgtcac

SEQ ID NO: 116997 - DNA, 26 bp, Homo sapiens
tctggcgggcagaggtgggtgtcaca

SEQ ID NO: 116998 - DNA, 26 bp, Homo sapiens
ctggcgggcagaggtgggtgtcacaa

SEQ ID NO: 116999 - DNA, 26 bp, Homo sapiens
tggcgggcagaggtgggtgtcacaag

SEQ ID NO: 117000 - DNA, 26 bp, Homo sapiens
ggcgggcagaggtgggtgtcacaagt

SEQ ID NO: 117001 - DNA, 26 bp, Homo sapiens
gcgggcagaggtgggtgtcacaagtt

SEQ ID NO: 117002 - DNA, 26 bp, Homo sapiens
cgggcagaggtgggtgtcacaagttg

SEQ ID NO: 117003 - DNA, 26 bp, Homo sapiens
gggcagaggtgggtgtcacaagttgc

SEQ ID NO: 117004 - DNA, 26 bp, Homo sapiens
ggcagaggtgggtgtcacaagttgct

SEQ ID NO: 117005 - DNA, 26 bp, Homo sapiens
gcagaggtgggtgtcacaagttgctt

SEQ ID NO: 117006 - DNA, 26 bp, Homo sapiens
cagaggtgggtgtcacaagttgctta

SEQ ID NO: 117007 - DNA, 26 bp, Homo sapiens
agaggtgggtgtcacaagttgcttag

SEQ ID NO: 117008 - DNA, 26 bp, Homo sapiens
gaggtgggtgtcacaagttgcttagt

SEQ ID NO: 117009 - DNA, 26 bp, Homo sapiens
aggtgggtgtcacaagttgcttagtg

SEQ ID NO: 117010 - DNA, 26 bp, Homo sapiens
ggtgggtgtcacaagttgcttagtgg

SEQ ID NO: 117011 - DNA, 26 bp, Homo sapiens
gtgggtgtcacaagttgcttagtggg

SEQ ID NO: 117012 - DNA, 26 bp, Homo sapiens
tgggtgtcacaagttgcttagtgggg

SEQ ID NO: 117013 - DNA, 26 bp, Homo sapiens
gggtgtcacaagttgcttagtggggg

SEQ ID NO: 117014 - DNA, 26 bp, Homo sapiens
ggtgtcacaagttgcttagtggggga

SEQ ID NO: 117015 - DNA, 26 bp, Homo sapiens
gtgtcacaagttgcttagtgggggag

SEQ ID NO: 117016 - DNA, 26 bp, Homo sapiens
tgtcacaagttgcttagtgggggagc

SEQ ID NO: 117017 - DNA, 26 bp, Homo sapiens
gtcacaagttgcttagtgggggagct

SEQ ID NO: 117018 - DNA, 26 bp, Homo sapiens
tcacaagttgcttagtgggggagctt

SEQ ID NO: 117019 - DNA, 26 bp, Homo sapiens
cacaagttgcttagtgggggagcttt

SEQ ID NO: 117020 - DNA, 26 bp, Homo sapiens
acaagttgcttagtgggggagctttt

SEQ ID NO: 117021 - DNA, 26 bp, Homo sapiens
caagttgcttagtgggggagcttttg

SEQ ID NO: 117022 - DNA, 26 bp, Homo sapiens
aagttgcttagtgggggagcttttga

SEQ ID NO: 117023 - DNA, 26 bp, Homo sapiens
agttgcttagtgggggagcttttgag

SEQ ID NO: 117024 - DNA, 26 bp, Homo sapiens
gttgcttagtgggggagcttttgagc

SEQ ID NO: 117025 - DNA, 26 bp, Homo sapiens
ttgcttagtgggggagcttttgagcc

SEQ ID NO: 117026 - DNA, 26 bp, Homo sapiens
tgcttagtgggggagcttttgagcca

SEQ ID NO: 117027 - DNA, 26 bp, Homo sapiens
gcttagtgggggagcttttgagccag

SEQ ID NO: 117028 - DNA, 26 bp, Homo sapiens
cttagtgggggagcttttgagccagg

SEQ ID NO: 117029 - DNA, 26 bp, Homo sapiens
ttagtgggggagcttttgagccagga

SEQ ID NO: 117030 - DNA, 26 bp, Homo sapiens
tagtgggggagcttttgagccaggat

SEQ ID NO: 117031 - DNA, 26 bp, Homo sapiens
agtgggggagcttttgagccaggatg

SEQ ID NO: 117032 - DNA, 26 bp, Homo sapiens
gtgggggagcttttgagccaggatga

SEQ ID NO: 117033 - DNA, 26 bp, Homo sapiens
tgggggagcttttgagccaggatgag

SEQ ID NO: 117034 - DNA, 26 bp, Homo sapiens
gggggagcttttgagccaggatgagc

SEQ ID NO: 117035 - DNA, 26 bp, Homo sapiens
ggggagcttttgagccaggatgagcc

SEQ ID NO: 117036 - DNA, 26 bp, Homo sapiens
gggagcttttgagccaggatgagcca

SEQ ID NO: 117037 - DNA, 26 bp, Homo sapiens
ggagcttttgagccaggatgagccag

SEQ ID NO: 117038 - DNA, 26 bp, Homo sapiens
gagcttttgagccaggatgagccagg

SEQ ID NO: 117039 - DNA, 26 bp, Homo sapiens
agcttttgagccaggatgagccagga

SEQ ID NO: 117040 - DNA, 26 bp, Homo sapiens
gcttttgagccaggatgagccaggag

SEQ ID NO: 117041 - DNA, 26 bp, Homo sapiens
cttttgagccaggatgagccaggaga

SEQ ID NO: 117042 - DNA, 26 bp, Homo sapiens
ttttgagccaggatgagccaggagaa

SEQ ID NO: 117043 - DNA, 26 bp, Homo sapiens
tttgagccaggatgagccaggagaag

SEQ ID NO: 117044 - DNA, 26 bp, Homo sapiens
ttgagccaggatgagccaggagaagg

SEQ ID NO: 117045 - DNA, 26 bp, Homo sapiens
tgagccaggatgagccaggagaagga

SEQ ID NO: 117046 - DNA, 26 bp, Homo sapiens
gagccaggatgagccaggagaaggaa

SEQ ID NO: 117047 - DNA, 26 bp, Homo sapiens
agccaggatgagccaggagaaggaat

SEQ ID NO: 117048 - DNA, 26 bp, Homo sapiens
gccaggatgagccaggagaaggaatt

SEQ ID NO: 117049 - DNA, 26 bp, Homo sapiens
ccaggatgagccaggagaaggaattt

SEQ ID NO: 117050 - DNA, 26 bp, Homo sapiens
caggatgagccaggagaaggaatttc

SEQ ID NO: 117051 - DNA, 26 bp, Homo sapiens
aggatgagccaggagaaggaatttca

SEQ ID NO: 117052 - DNA, 26 bp, Homo sapiens
ggatgagccaggagaaggaatttcac

SEQ ID NO: 117053 - DNA, 26 bp, Homo sapiens
gatgagccaggagaaggaatttcaca

SEQ ID NO: 117054 - DNA, 26 bp, Homo sapiens
atgagccaggagaaggaatttcacaa

SEQ ID NO: 117055 - DNA, 26 bp, Homo sapiens
tgagccaggagaaggaatttcacaag

SEQ ID NO: 117056 - DNA, 26 bp, Homo sapiens
gagccaggagaaggaatttcacaagg

SEQ ID NO: 117057 - DNA, 26 bp, Homo sapiens
agccaggagaaggaatttcacaaggt

SEQ ID NO: 117058 - DNA, 26 bp, Homo sapiens
gccaggagaaggaatttcacaaggta

SEQ ID NO: 117059 - DNA, 26 bp, Homo sapiens
ccaggagaaggaatttcacaaggtaa

SEQ ID NO: 117060 - DNA, 26 bp, Homo sapiens
caggagaaggaatttcacaaggtaat

SEQ ID NO: 117061 - DNA, 26 bp, Homo sapiens
aggagaaggaatttcacaaggtaatg

SEQ ID NO: 117062 - DNA, 26 bp, Homo sapiens
ggagaaggaatttcacaaggtaatgt

SEQ ID NO: 117063 - DNA, 26 bp, Homo sapiens
gagaaggaatttcacaaggtaatgtc

SEQ ID NO: 117064 - DNA, 26 bp, Homo sapiens
agaaggaatttcacaaggtaatgtca

SEQ ID NO: 117065 - DNA, 26 bp, Homo sapiens
gaaggaatttcacaaggtaatgtcat

SEQ ID NO: 117066 - DNA, 26 bp, Homo sapiens
aaggaatttcacaaggtaatgtcatc

SEQ ID NO: 117067 - DNA, 26 bp, Homo sapiens
aggaatttcacaaggtaatgtcatca

SEQ ID NO: 117068 - DNA, 26 bp, Homo sapiens
ggaatttcacaaggtaatgtcatcag

SEQ ID NO: 117069 - DNA, 26 bp, Homo sapiens
gaatttcacaaggtaatgtcatcagt

SEQ ID NO: 117070 - DNA, 26 bp, Homo sapiens
aatttcacaaggtaatgtcatcagtt

SEQ ID NO: 117071 - DNA, 26 bp, Homo sapiens
atttcacaaggtaatgtcatcagtta

SEQ ID NO: 117072 - DNA, 26 bp, Homo sapiens
tttcacaaggtaatgtcatcagttaa

SEQ ID NO: 117073 - DNA, 26 bp, Homo sapiens
ttcacaaggtaatgtcatcagttaag

SEQ ID NO: 117074 - DNA, 26 bp, Homo sapiens
tcacaaggtaatgtcatcagttaagg

SEQ ID NO: 117075 - DNA, 26 bp, Homo sapiens
cacaaggtaatgtcatcagttaaggc

SEQ ID NO: 117076 - DNA, 26 bp, Homo sapiens
acaaggtaatgtcatcagttaaggca

SEQ ID NO: 117077 - DNA, 26 bp, Homo sapiens
caaggtaatgtcatcagttaaggcag

SEQ ID NO: 117078 - DNA, 26 bp, Homo sapiens
aaggtaatgtcatcagttaaggcagg

SEQ ID NO: 117079 - DNA, 26 bp, Homo sapiens
aggtaatgtcatcagttaaggcagga

SEQ ID NO: 117080 - DNA, 26 bp, Homo sapiens
ggtaatgtcatcagttaaggcaggaa

SEQ ID NO: 117081 - DNA, 26 bp, Homo sapiens
gtaatgtcatcagttaaggcaggaac

SEQ ID NO: 117082 - DNA, 26 bp, Homo sapiens
taatgtcatcagttaaggcaggaaca

SEQ ID NO: 117083 - DNA, 26 bp, Homo sapiens
aatgtcatcagttaaggcaggaacag

SEQ ID NO: 117084 - DNA, 26 bp, Homo sapiens
atgtcatcagttaaggcaggaacagg

SEQ ID NO: 117085 - DNA, 26 bp, Homo sapiens
tgtcatcagttaaggcaggaacaggc

SEQ ID NO: 117086 - DNA, 26 bp, Homo sapiens
gtcatcagttaaggcaggaacaggcc

SEQ ID NO: 117087 - DNA, 26 bp, Homo sapiens
tcatcagttaaggcaggaacaggcca

SEQ ID NO: 117088 - DNA, 26 bp, Homo sapiens
catcagttaaggcaggaacaggccat

SEQ ID NO: 117089 - DNA, 26 bp, Homo sapiens
atcagttaaggcaggaacaggccatt

SEQ ID NO: 117090 - DNA, 26 bp, Homo sapiens
tcagttaaggcaggaacaggccattt

SEQ ID NO: 117091 - DNA, 26 bp, Homo sapiens
cagttaaggcaggaacaggccatttt

SEQ ID NO: 117092 - DNA, 26 bp, Homo sapiens
agttaaggcaggaacaggccattttc

SEQ ID NO: 117093 - DNA, 26 bp, Homo sapiens
gttaaggcaggaacaggccattttca

SEQ ID NO: 117094 - DNA, 26 bp, Homo sapiens
ttaaggcaggaacaggccattttcac

SEQ ID NO: 117095 - DNA, 26 bp, Homo sapiens
taaggcaggaacaggccattttcact

SEQ ID NO: 117096 - DNA, 26 bp, Homo sapiens
aaggcaggaacaggccattttcactt

SEQ ID NO: 117097 - DNA, 26 bp, Homo sapiens
aggcaggaacaggccattttcacttc

SEQ ID NO: 117098 - DNA, 26 bp, Homo sapiens
ggcaggaacaggccattttcacttct

SEQ ID NO: 117099 - DNA, 26 bp, Homo sapiens
gcaggaacaggccattttcacttctt

SEQ ID NO: 117100 - DNA, 26 bp, Homo sapiens
caggaacaggccattttcacttcttt

SEQ ID NO: 117101 - DNA, 26 bp, Homo sapiens
aggaacaggccattttcacttctttt

SEQ ID NO: 117102 - DNA, 26 bp, Homo sapiens
ggaacaggccattttcacttcttttg

SEQ ID NO: 117103 - DNA, 26 bp, Homo sapiens
gaacaggccattttcacttcttttgt

SEQ ID NO: 117104 - DNA, 26 bp, Homo sapiens
aacaggccattttcacttcttttgtg

SEQ ID NO: 117105 - DNA, 26 bp, Homo sapiens
acaggccattttcacttcttttgtga

SEQ ID NO: 117106 - DNA, 26 bp, Homo sapiens
caggccattttcacttcttttgtgat

SEQ ID NO: 117107 - DNA, 26 bp, Homo sapiens
aggccattttcacttcttttgtgatt

SEQ ID NO: 117108 - DNA, 26 bp, Homo sapiens
ggccattttcacttcttttgtgattc

SEQ ID NO: 117109 - DNA, 26 bp, Homo sapiens
gccattttcacttcttttgtgattct

SEQ ID NO: 117110 - DNA, 26 bp, Homo sapiens
ccattttcacttcttttgtgattctt

SEQ ID NO: 117111 - DNA, 26 bp, Homo sapiens
cattttcacttcttttgtgattcttc

SEQ ID NO: 117112 - DNA, 26 bp, Homo sapiens
attttcacttcttttgtgattcttca

SEQ ID NO: 117113 - DNA, 26 bp, Homo sapiens
ttttcacttcttttgtgattcttcac

SEQ ID NO: 117114 - DNA, 26 bp, Homo sapiens
tttcacttcttttgtgattcttcact

SEQ ID NO: 117115 - DNA, 26 bp, Homo sapiens
ttcacttcttttgtgattcttcactt

SEQ ID NO: 117116 - DNA, 26 bp, Homo sapiens
tcacttcttttgtgattcttcacttg

SEQ ID NO: 117117 - DNA, 26 bp, Homo sapiens
cacttcttttgtgattcttcacttgc

SEQ ID NO: 117118 - DNA, 26 bp, Homo sapiens
acttcttttgtgattcttcacttgct

SEQ ID NO: 117119 - DNA, 26 bp, Homo sapiens
cttcttttgtgattcttcacttgctt

SEQ ID NO: 117120 - DNA, 26 bp, Homo sapiens
ttcttttgtgattcttcacttgcttc

SEQ ID NO: 117121 - DNA, 26 bp, Homo sapiens
tcttttgtgattcttcacttgcttca

SEQ ID NO: 117122 - DNA, 26 bp, Homo sapiens
cttttgtgattcttcacttgcttcag

SEQ ID NO: 117123 - DNA, 26 bp, Homo sapiens
ttttgtgattcttcacttgcttcagg

SEQ ID NO: 117124 - DNA, 26 bp, Homo sapiens
tttgtgattcttcacttgcttcaggc

SEQ ID NO: 117125 - DNA, 26 bp, Homo sapiens
ttgtgattcttcacttgcttcaggcc

SEQ ID NO: 117126 - DNA, 26 bp, Homo sapiens
tgtgattcttcacttgcttcaggcca

SEQ ID NO: 117127 - DNA, 26 bp, Homo sapiens
gtgattcttcacttgcttcaggccat

SEQ ID NO: 117128 - DNA, 26 bp, Homo sapiens
tgattcttcacttgcttcaggccatc

SEQ ID NO: 117129 - DNA, 26 bp, Homo sapiens
gattcttcacttgcttcaggccatct

SEQ ID NO: 117130 - DNA, 26 bp, Homo sapiens
attcttcacttgcttcaggccatctg

SEQ ID NO: 117131 - DNA, 26 bp, Homo sapiens
ttcttcacttgcttcaggccatctgg

SEQ ID NO: 117132 - DNA, 26 bp, Homo sapiens
tcttcacttgcttcaggccatctgga

SEQ ID NO: 117133 - DNA, 26 bp, Homo sapiens
cttcacttgcttcaggccatctggac

SEQ ID NO: 117134 - DNA, 26 bp, Homo sapiens
ttcacttgcttcaggccatctggacg

SEQ ID NO: 117135 - DNA, 26 bp, Homo sapiens
tcacttgcttcaggccatctggacgt

SEQ ID NO: 117136 - DNA, 26 bp, Homo sapiens
cacttgcttcaggccatctggacgta

SEQ ID NO: 117137 - DNA, 26 bp, Homo sapiens
acttgcttcaggccatctggacgtat

SEQ ID NO: 117138 - DNA, 26 bp, Homo sapiens
cttgcttcaggccatctggacgtatg

SEQ ID NO: 117139 - DNA, 26 bp, Homo sapiens
ttgcttcaggccatctggacgtatgt

SEQ ID NO: 117140 - DNA, 26 bp, Homo sapiens
tgcttcaggccatctggacgtatgta

SEQ ID NO: 117141 - DNA, 26 bp, Homo sapiens
gcttcaggccatctggacgtatgtac

SEQ ID NO: 117142 - DNA, 26 bp, Homo sapiens
cttcaggccatctggacgtatgtaca

SEQ ID NO: 117143 - DNA, 26 bp, Homo sapiens
ttcaggccatctggacgtatgtacat

SEQ ID NO: 117144 - DNA, 26 bp, Homo sapiens
tcaggccatctggacgtatgtacatg

SEQ ID NO: 117145 - DNA, 26 bp, Homo sapiens
caggccatctggacgtatgtacatgc

SEQ ID NO: 117146 - DNA, 26 bp, Homo sapiens
aggccatctggacgtatgtacatgca

SEQ ID NO: 117147 - DNA, 26 bp, Homo sapiens
ggccatctggacgtatgtacatgcag

SEQ ID NO: 117148 - DNA, 26 bp, Homo sapiens
gccatctggacgtatgtacatgcagg

SEQ ID NO: 117149 - DNA, 26 bp, Homo sapiens
ccatctggacgtatgtacatgcaggt

SEQ ID NO: 117150 - DNA, 26 bp, Homo sapiens
catctggacgtatgtacatgcaggtc

SEQ ID NO: 117151 - DNA, 26 bp, Homo sapiens
atctggacgtatgtacatgcaggtca

SEQ ID NO: 117152 - DNA, 26 bp, Homo sapiens
tctggacgtatgtacatgcaggtcac

SEQ ID NO: 117153 - DNA, 26 bp, Homo sapiens
ctggacgtatgtacatgcaggtcaca

SEQ ID NO: 117154 - DNA, 26 bp, Homo sapiens
tggacgtatgtacatgcaggtcacag

SEQ ID NO: 117155 - DNA, 26 bp, Homo sapiens
ggacgtatgtacatgcaggtcacagg

SEQ ID NO: 117156 - DNA, 26 bp, Homo sapiens
gacgtatgtacatgcaggtcacaggg

SEQ ID NO: 117157 - DNA, 26 bp, Homo sapiens
acgtatgtacatgcaggtcacagggg

SEQ ID NO: 117158 - DNA, 26 bp, Homo sapiens
cgtatgtacatgcaggtcacagggga

SEQ ID NO: 117159 - DNA, 26 bp, Homo sapiens
gtatgtacatgcaggtcacaggggat

SEQ ID NO: 117160 - DNA, 26 bp, Homo sapiens
tatgtacatgcaggtcacaggggata

SEQ ID NO: 117161 - DNA, 26 bp, Homo sapiens
atgtacatgcaggtcacaggggatat

SEQ ID NO: 117162 - DNA, 26 bp, Homo sapiens
tgtacatgcaggtcacaggggatatg

SEQ ID NO: 117163 - DNA, 26 bp, Homo sapiens
gtacatgcaggtcacaggggatatga

SEQ ID NO: 117164 - DNA, 26 bp, Homo sapiens
tacatgcaggtcacaggggatatgat

SEQ ID NO: 117165 - DNA, 26 bp, Homo sapiens
acatgcaggtcacaggggatatgatg

SEQ ID NO: 117166 - DNA, 26 bp, Homo sapiens
catgcaggtcacaggggatatgatgg

SEQ ID NO: 117167 - DNA, 26 bp, Homo sapiens
atgcaggtcacaggggatatgatggc

SEQ ID NO: 117168 - DNA, 26 bp, Homo sapiens
tgcaggtcacaggggatatgatggct

SEQ ID NO: 117169 - DNA, 26 bp, Homo sapiens
gcaggtcacaggggatatgatggctt

SEQ ID NO: 117170 - DNA, 26 bp, Homo sapiens
caggtcacaggggatatgatggctta

SEQ ID NO: 117171 - DNA, 26 bp, Homo sapiens
aggtcacaggggatatgatggcttag

SEQ ID NO: 117172 - DNA, 26 bp, Homo sapiens
ggtcacaggggatatgatggcttagc

SEQ ID NO: 117173 - DNA, 26 bp, Homo sapiens
gtcacaggggatatgatggcttagct

SEQ ID NO: 117174 - DNA, 26 bp, Homo sapiens
tcacaggggatatgatggcttagctt

SEQ ID NO: 117175 - DNA, 26 bp, Homo sapiens
cacaggggatatgatggcttagcttg

SEQ ID NO: 117176 - DNA, 26 bp, Homo sapiens
acaggggatatgatggcttagcttgg

SEQ ID NO: 117177 - DNA, 26 bp, Homo sapiens
caggggatatgatggcttagcttggg

SEQ ID NO: 117178 - DNA, 26 bp, Homo sapiens
aggggatatgatggcttagcttgggc

SEQ ID NO: 117179 - DNA, 26 bp, Homo sapiens
ggggatatgatggcttagcttgggct

SEQ ID NO: 117180 - DNA, 26 bp, Homo sapiens
gggatatgatggcttagcttgggctc

SEQ ID NO: 117181 - DNA, 26 bp, Homo sapiens
ggatatgatggcttagcttgggctca

SEQ ID NO: 117182 - DNA, 26 bp, Homo sapiens
gatatgatggcttagcttgggctcag

SEQ ID NO: 117183 - DNA, 26 bp, Homo sapiens
atatgatggcttagcttgggctcaga

SEQ ID NO: 117184 - DNA, 26 bp, Homo sapiens
tatgatggcttagcttgggctcagag

SEQ ID NO: 117185 - DNA, 26 bp, Homo sapiens
atgatggcttagcttgggctcagagg

SEQ ID NO: 117186 - DNA, 26 bp, Homo sapiens
tgatggcttagcttgggctcagaggc

SEQ ID NO: 117187 - DNA, 26 bp, Homo sapiens
gatggcttagcttgggctcagaggcc

SEQ ID NO: 117188 - DNA, 26 bp, Homo sapiens
atggcttagcttgggctcagaggcct

SEQ ID NO: 117189 - DNA, 26 bp, Homo sapiens
tggcttagcttgggctcagaggcctg

SEQ ID NO: 117190 - DNA, 26 bp, Homo sapiens
ggcttagcttgggctcagaggcctga

SEQ ID NO: 117191 - DNA, 26 bp, Homo sapiens
gcttagcttgggctcagaggcctgac

SEQ ID NO: 117192 - DNA, 26 bp, Homo sapiens
cttagcttgggctcagaggcctgaca

SEQ ID NO: 117193 - DNA, 26 bp, Homo sapiens
ttagcttgggctcagaggcctgacat

SEQ ID NO: 117194 - DNA, 26 bp, Homo sapiens
tagcttgggctcagaggcctgacatt

SEQ ID NO: 117195 - DNA, 26 bp, Homo sapiens
agcttgggctcagaggcctgacattt

SEQ ID NO: 117196 - DNA, 26 bp, Homo sapiens
gcttgggctcagaggcctgacattta

SEQ ID NO: 117197 - DNA, 26 bp, Homo sapiens
cttgggctcagaggcctgacatttag

SEQ ID NO: 117198 - DNA, 26 bp, Homo sapiens
ttgggctcagaggcctgacatttagt

SEQ ID NO: 117199 - DNA, 26 bp, Homo sapiens
tgggctcagaggcctgacatttagta

SEQ ID NO: 117200 - DNA, 26 bp, Homo sapiens
gggctcagaggcctgacatttagtat

SEQ ID NO: 117201 - DNA, 26 bp, Homo sapiens
ggctcagaggcctgacatttagtata

SEQ ID NO: 117202 - DNA, 26 bp, Homo sapiens
gctcagaggcctgacatttagtatat

SEQ ID NO: 117203 - DNA, 26 bp, Homo sapiens
ctcagaggcctgacatttagtatatt

SEQ ID NO: 117204 - DNA, 26 bp, Homo sapiens
tcagaggcctgacatttagtatattt

SEQ ID NO: 117205 - DNA, 26 bp, Homo sapiens
cagaggcctgacatttagtatattta

SEQ ID NO: 117206 - DNA, 26 bp, Homo sapiens
agaggcctgacatttagtatatttac

SEQ ID NO: 117207 - DNA, 26 bp, Homo sapiens
gaggcctgacatttagtatatttact

SEQ ID NO: 117208 - DNA, 26 bp, Homo sapiens
aggcctgacatttagtatatttacta

SEQ ID NO: 117209 - DNA, 26 bp, Homo sapiens
ggcctgacatttagtatatttactaa

SEQ ID NO: 117210 - DNA, 26 bp, Homo sapiens
gcctgacatttagtatatttactaaa

SEQ ID NO: 117211 - DNA, 26 bp, Homo sapiens
cctgacatttagtatatttactaaat

SEQ ID NO: 117212 - DNA, 26 bp, Homo sapiens
ctgacatttagtatatttactaaata

SEQ ID NO: 117213 - DNA, 26 bp, Homo sapiens
tgacatttagtatatttactaaatag

SEQ ID NO: 117214 - DNA, 26 bp, Homo sapiens
gacatttagtatatttactaaataga

SEQ ID NO: 117215 - DNA, 26 bp, Homo sapiens
acatttagtatatttactaaatagat

SEQ ID NO: 117216 - DNA, 26 bp, Homo sapiens
catttagtatatttactaaatagata

SEQ ID NO: 117217 - DNA, 26 bp, Homo sapiens
atttagtatatttactaaatagatat

SEQ ID NO: 117218 - DNA, 26 bp, Homo sapiens
tttagtatatttactaaatagatata

SEQ ID NO: 117219 - DNA, 26 bp, Homo sapiens
ttagtatatttactaaatagatataa

SEQ ID NO: 117220 - DNA, 26 bp, Homo sapiens
tagtatatttactaaatagatataaa

SEQ ID NO: 117221 - DNA, 26 bp, Homo sapiens
agtatatttactaaatagatataaaa

SEQ ID NO: 117222 - DNA, 26 bp, Homo sapiens
gtatatttactaaatagatataaaat

SEQ ID NO: 117223 - DNA, 26 bp, Homo sapiens
tatatttactaaatagatataaaata

SEQ ID NO: 117224 - DNA, 26 bp, Homo sapiens
atatttactaaatagatataaaatat

SEQ ID NO: 117225 - DNA, 26 bp, Homo sapiens
tatttactaaatagatataaaatata

SEQ ID NO: 117226 - DNA, 26 bp, Homo sapiens
atttactaaatagatataaaatatat

SEQ ID NO: 117227 - DNA, 26 bp, Homo sapiens
tttactaaatagatataaaatatatt

SEQ ID NO: 117228 - DNA, 26 bp, Homo sapiens
ttactaaatagatataaaatatattt

SEQ ID NO: 117229 - DNA, 26 bp, Homo sapiens
tactaaatagatataaaatatattta

SEQ ID NO: 117230 - DNA, 26 bp, Homo sapiens
actaaatagatataaaatatatttac

SEQ ID NO: 117231 - DNA, 26 bp, Homo sapiens
ctaaatagatataaaatatatttact

SEQ ID NO: 117232 - DNA, 26 bp, Homo sapiens
taaatagatataaaatatatttacta

SEQ ID NO: 117233 - DNA, 26 bp, Homo sapiens
aaatagatataaaatatatttactaa

SEQ ID NO: 117234 - DNA, 26 bp, Homo sapiens
aatagatataaaatatatttactaac

SEQ ID NO: 117235 - DNA, 26 bp, Homo sapiens
atagatataaaatatatttactaact

SEQ ID NO: 117236 - DNA, 26 bp, Homo sapiens
tagatataaaatatatttactaacta

SEQ ID NO: 117237 - DNA, 26 bp, Homo sapiens
agatataaaatatatttactaactat

SEQ ID NO: 117238 - DNA, 26 bp, Homo sapiens
gatataaaatatatttactaactata

SEQ ID NO: 117239 - DNA, 26 bp, Homo sapiens
atataaaatatatttactaactataa

SEQ ID NO: 117240 - DNA, 26 bp, Homo sapiens
tataaaatatatttactaactataag

SEQ ID NO: 117241 - DNA, 26 bp, Homo sapiens
ataaaatatatttactaactataagt

SEQ ID NO: 117242 - DNA, 26 bp, Homo sapiens
taaaatatatttactaactataagta

SEQ ID NO: 117243 - DNA, 26 bp, Homo sapiens
aaaatatatttactaactataagtat

SEQ ID NO: 117244 - DNA, 26 bp, Homo sapiens
aaatatatttactaactataagtata

SEQ ID NO: 117245 - DNA, 26 bp, Homo sapiens
aatatatttactaactataagtatat

SEQ ID NO: 117246 - DNA, 26 bp, Homo sapiens
atatatttactaactataagtatata

SEQ ID NO: 117247 - DNA, 26 bp, Homo sapiens
tatatttactaactataagtatatat

SEQ ID NO: 117248 - DNA, 26 bp, Homo sapiens
atatttactaactataagtatatatt

SEQ ID NO: 117249 - DNA, 26 bp, Homo sapiens
tatttactaactataagtatatattt

SEQ ID NO: 117250 - DNA, 26 bp, Homo sapiens
atttactaactataagtatatattta

SEQ ID NO: 117251 - DNA, 26 bp, Homo sapiens
tttactaactataagtatatatttac

SEQ ID NO: 117252 - DNA, 26 bp, Homo sapiens
ttactaactataagtatatatttact

SEQ ID NO: 117253 - DNA, 26 bp, Homo sapiens
tactaactataagtatatatttacta

SEQ ID NO: 117254 - DNA, 26 bp, Homo sapiens
actaactataagtatatatttactaa

SEQ ID NO: 117255 - DNA, 26 bp, Homo sapiens
ctaactataagtatatatttactaaa

SEQ ID NO: 117256 - DNA, 26 bp, Homo sapiens
taactataagtatatatttactaaac

SEQ ID NO: 117257 - DNA, 26 bp, Homo sapiens
aactataagtatatatttactaaaca

SEQ ID NO: 117258 - DNA, 26 bp, Homo sapiens
actataagtatatatttactaaacat

SEQ ID NO: 117259 - DNA, 26 bp, Homo sapiens
ctataagtatatatttactaaacata

SEQ ID NO: 117260 - DNA, 26 bp, Homo sapiens
tataagtatatatttactaaacatat

SEQ ID NO: 117261 - DNA, 26 bp, Homo sapiens
ataagtatatatttactaaacatata

SEQ ID NO: 117262 - DNA, 26 bp, Homo sapiens
taagtatatatttactaaacatatac

SEQ ID NO: 117263 - DNA, 26 bp, Homo sapiens
aagtatatatttactaaacatataca

SEQ ID NO: 117264 - DNA, 26 bp, Homo sapiens
agtatatatttactaaacatatacat

SEQ ID NO: 117265 - DNA, 26 bp, Homo sapiens
gtatatatttactaaacatatacatt

SEQ ID NO: 117266 - DNA, 26 bp, Homo sapiens
tatatatttactaaacatatacattt

SEQ ID NO: 117267 - DNA, 26 bp, Homo sapiens
atatatttactaaacatatacattta

SEQ ID NO: 117268 - DNA, 26 bp, Homo sapiens
tatatttactaaacatatacatttat

SEQ ID NO: 117269 - DNA, 26 bp, Homo sapiens
atatttactaaacatatacatttata

SEQ ID NO: 117270 - DNA, 26 bp, Homo sapiens
tatttactaaacatatacatttatat

SEQ ID NO: 117271 - DNA, 26 bp, Homo sapiens
atttactaaacatatacatttatatt

SEQ ID NO: 117272 - DNA, 26 bp, Homo sapiens
tttactaaacatatacatttatattt

SEQ ID NO: 117273 - DNA, 26 bp, Homo sapiens
ttactaaacatatacatttatattta

SEQ ID NO: 117274 - DNA, 26 bp, Homo sapiens
tactaaacatatacatttatatttat

SEQ ID NO: 117275 - DNA, 26 bp, Homo sapiens
actaaacatatacatttatatttata

SEQ ID NO: 117276 - DNA, 26 bp, Homo sapiens
ctaaacatatacatttatatttatat

SEQ ID NO: 117277 - DNA, 26 bp, Homo sapiens
taaacatatacatttatatttatatg

SEQ ID NO: 117278 - DNA, 26 bp, Homo sapiens
aaacatatacatttatatttatatgt

SEQ ID NO: 117279 - DNA, 26 bp, Homo sapiens
aacatatacatttatatttatatgta

SEQ ID NO: 117280 - DNA, 26 bp, Homo sapiens
acatatacatttatatttatatgtac

SEQ ID NO: 117281 - DNA, 26 bp, Homo sapiens
catatacatttatatttatatgtact

SEQ ID NO: 117282 - DNA, 26 bp, Homo sapiens
atatacatttatatttatatgtacta

SEQ ID NO: 117283 - DNA, 26 bp, Homo sapiens
tatacatttatatttatatgtactat

SEQ ID NO: 117284 - DNA, 26 bp, Homo sapiens
atacatttatatttatatgtactata

SEQ ID NO: 117285 - DNA, 26 bp, Homo sapiens
tacatttatatttatatgtactatat

SEQ ID NO: 117286 - DNA, 26 bp, Homo sapiens
acatttatatttatatgtactatata

SEQ ID NO: 117287 - DNA, 26 bp, Homo sapiens
catttatatttatatgtactatataa

SEQ ID NO: 117288 - DNA, 26 bp, Homo sapiens
atttatatttatatgtactatataaa

SEQ ID NO: 117289 - DNA, 26 bp, Homo sapiens
tttatatttatatgtactatataaat

SEQ ID NO: 117290 - DNA, 26 bp, Homo sapiens
ttatatttatatgtactatataaata

SEQ ID NO: 117291 - DNA, 26 bp, Homo sapiens
tatatttatatgtactatataaatac

SEQ ID NO: 117292 - DNA, 26 bp, Homo sapiens
atatttatatgtactatataaatacc

SEQ ID NO: 117293 - DNA, 26 bp, Homo sapiens
tatttatatgtactatataaataccc

SEQ ID NO: 117294 - DNA, 26 bp, Homo sapiens
atttatatgtactatataaataccca

SEQ ID NO: 117295 - DNA, 26 bp, Homo sapiens
tttatatgtactatataaatacccaa

SEQ ID NO: 117296 - DNA, 26 bp, Homo sapiens
ttatatgtactatataaatacccaat

SEQ ID NO: 117297 - DNA, 26 bp, Homo sapiens
tatatgtactatataaatacccaata

SEQ ID NO: 117298 - DNA, 26 bp, Homo sapiens
atatgtactatataaatacccaatag

SEQ ID NO: 117299 - DNA, 26 bp, Homo sapiens
tatgtactatataaatacccaatagt

SEQ ID NO: 117300 - DNA, 26 bp, Homo sapiens
atgtactatataaatacccaatagta

SEQ ID NO: 117301 - DNA, 26 bp, Homo sapiens
tgtactatataaatacccaatagtag

SEQ ID NO: 117302 - DNA, 26 bp, Homo sapiens
gtactatataaatacccaatagtaga

SEQ ID NO: 117303 - DNA, 26 bp, Homo sapiens
tactatataaatacccaatagtagaa

SEQ ID NO: 117304 - DNA, 26 bp, Homo sapiens
actatataaatacccaatagtagaat

SEQ ID NO: 117305 - DNA, 26 bp, Homo sapiens
ctatataaatacccaatagtagaatt

SEQ ID NO: 117306 - DNA, 26 bp, Homo sapiens
tatataaatacccaatagtagaattg

SEQ ID NO: 117307 - DNA, 26 bp, Homo sapiens
atataaatacccaatagtagaattgc

SEQ ID NO: 117308 - DNA, 26 bp, Homo sapiens
tataaatacccaatagtagaattgct

SEQ ID NO: 117309 - DNA, 26 bp, Homo sapiens
ataaatacccaatagtagaattgcta

SEQ ID NO: 117310 - DNA, 26 bp, Homo sapiens
taaatacccaatagtagaattgctag

SEQ ID NO: 117311 - DNA, 26 bp, Homo sapiens
aaatacccaatagtagaattgctaga

SEQ ID NO: 117312 - DNA, 26 bp, Homo sapiens
aatacccaatagtagaattgctagac

SEQ ID NO: 117313 - DNA, 26 bp, Homo sapiens
atacccaatagtagaattgctagaca

SEQ ID NO: 117314 - DNA, 26 bp, Homo sapiens
tacccaatagtagaattgctagacaa

SEQ ID NO: 117315 - DNA, 26 bp, Homo sapiens
acccaatagtagaattgctagacaaa

SEQ ID NO: 117316 - DNA, 26 bp, Homo sapiens
cccaatagtagaattgctagacaaaa

SEQ ID NO: 117317 - DNA, 26 bp, Homo sapiens
ccaatagtagaattgctagacaaaat

SEQ ID NO: 117318 - DNA, 26 bp, Homo sapiens
caatagtagaattgctagacaaaatg

SEQ ID NO: 117319 - DNA, 26 bp, Homo sapiens
aatagtagaattgctagacaaaatgt

SEQ ID NO: 117320 - DNA, 26 bp, Homo sapiens
atagtagaattgctagacaaaatgta

SEQ ID NO: 117321 - DNA, 26 bp, Homo sapiens
tagtagaattgctagacaaaatgtat

SEQ ID NO: 117322 - DNA, 26 bp, Homo sapiens
agtagaattgctagacaaaatgtatg

SEQ ID NO: 117323 - DNA, 26 bp, Homo sapiens
gtagaattgctagacaaaatgtatgt

SEQ ID NO: 117324 - DNA, 26 bp, Homo sapiens
tagaattgctagacaaaatgtatgta

SEQ ID NO: 117325 - DNA, 26 bp, Homo sapiens
agaattgctagacaaaatgtatgtac

SEQ ID NO: 117326 - DNA, 26 bp, Homo sapiens
gaattgctagacaaaatgtatgtaca

SEQ ID NO: 117327 - DNA, 26 bp, Homo sapiens
aattgctagacaaaatgtatgtacat

SEQ ID NO: 117328 - DNA, 26 bp, Homo sapiens
attgctagacaaaatgtatgtacatt

SEQ ID NO: 117329 - DNA, 26 bp, Homo sapiens
ttgctagacaaaatgtatgtacatta

SEQ ID NO: 117330 - DNA, 26 bp, Homo sapiens
tgctagacaaaatgtatgtacattaa

SEQ ID NO: 117331 - DNA, 26 bp, Homo sapiens
gctagacaaaatgtatgtacattaaa

SEQ ID NO: 117332 - DNA, 26 bp, Homo sapiens
ctagacaaaatgtatgtacattaaaa

SEQ ID NO: 117333 - DNA, 26 bp, Homo sapiens
tagacaaaatgtatgtacattaaaat

SEQ ID NO: 117334 - DNA, 26 bp, Homo sapiens
agacaaaatgtatgtacattaaaatt

SEQ ID NO: 117335 - DNA, 26 bp, Homo sapiens
gacaaaatgtatgtacattaaaattt

SEQ ID NO: 117336 - DNA, 26 bp, Homo sapiens
acaaaatgtatgtacattaaaatttt

SEQ ID NO: 117337 - DNA, 26 bp, Homo sapiens
caaaatgtatgtacattaaaattttg

SEQ ID NO: 117338 - DNA, 26 bp, Homo sapiens
aaaatgtatgtacattaaaattttga

SEQ ID NO: 117339 - DNA, 26 bp, Homo sapiens
aaatgtatgtacattaaaattttgat

SEQ ID NO: 117340 - DNA, 26 bp, Homo sapiens
aatgtatgtacattaaaattttgata

SEQ ID NO: 117341 - DNA, 26 bp, Homo sapiens
atgtatgtacattaaaattttgatat

SEQ ID NO: 117342 - DNA, 26 bp, Homo sapiens
tgtatgtacattaaaattttgatata

SEQ ID NO: 117343 - DNA, 26 bp, Homo sapiens
gtatgtacattaaaattttgatatac

SEQ ID NO: 117344 - DNA, 26 bp, Homo sapiens
tatgtacattaaaattttgatataca

SEQ ID NO: 117345 - DNA, 26 bp, Homo sapiens
atgtacattaaaattttgatatacaa

SEQ ID NO: 117346 - DNA, 26 bp, Homo sapiens
tgtacattaaaattttgatatacaat

SEQ ID NO: 117347 - DNA, 26 bp, Homo sapiens
gtacattaaaattttgatatacaatt

SEQ ID NO: 117348 - DNA, 26 bp, Homo sapiens
tacattaaaattttgatatacaattc

SEQ ID NO: 117349 - DNA, 26 bp, Homo sapiens
acattaaaattttgatatacaattcc

SEQ ID NO: 117350 - DNA, 26 bp, Homo sapiens
cattaaaattttgatatacaattcca

SEQ ID NO: 117351 - DNA, 26 bp, Homo sapiens
attaaaattttgatatacaattccaa

SEQ ID NO: 117352 - DNA, 26 bp, Homo sapiens
ttaaaattttgatatacaattccaac

SEQ ID NO: 117353 - DNA, 26 bp, Homo sapiens
taaaattttgatatacaattccaaca

SEQ ID NO: 117354 - DNA, 26 bp, Homo sapiens
aaaattttgatatacaattccaacag

SEQ ID NO: 117355 - DNA, 26 bp, Homo sapiens
aaattttgatatacaattccaacaga

SEQ ID NO: 117356 - DNA, 26 bp, Homo sapiens
aattttgatatacaattccaacagat

SEQ ID NO: 117357 - DNA, 26 bp, Homo sapiens
attttgatatacaattccaacagatc

SEQ ID NO: 117358 - DNA, 26 bp, Homo sapiens
ttttgatatacaattccaacagatca

SEQ ID NO: 117359 - DNA, 26 bp, Homo sapiens
tttgatatacaattccaacagatcac

SEQ ID NO: 117360 - DNA, 26 bp, Homo sapiens
ttgatatacaattccaacagatcact

SEQ ID NO: 117361 - DNA, 26 bp, Homo sapiens
tgatatacaattccaacagatcactc

SEQ ID NO: 117362 - DNA, 26 bp, Homo sapiens
gatatacaattccaacagatcactct

SEQ ID NO: 117363 - DNA, 26 bp, Homo sapiens
atatacaattccaacagatcactctc

SEQ ID NO: 117364 - DNA, 26 bp, Homo sapiens
tatacaattccaacagatcactctca

SEQ ID NO: 117365 - DNA, 26 bp, Homo sapiens
atacaattccaacagatcactctcac

SEQ ID NO: 117366 - DNA, 26 bp, Homo sapiens
tacaattccaacagatcactctcact

SEQ ID NO: 117367 - DNA, 26 bp, Homo sapiens
acaattccaacagatcactctcacta

SEQ ID NO: 117368 - DNA, 26 bp, Homo sapiens
caattccaacagatcactctcactag

SEQ ID NO: 117369 - DNA, 26 bp, Homo sapiens
aattccaacagatcactctcactagc

SEQ ID NO: 117370 - DNA, 26 bp, Homo sapiens
attccaacagatcactctcactagcc

SEQ ID NO: 117371 - DNA, 26 bp, Homo sapiens
ttccaacagatcactctcactagcca

SEQ ID NO: 117372 - DNA, 26 bp, Homo sapiens
tccaacagatcactctcactagccaa

SEQ ID NO: 117373 - DNA, 26 bp, Homo sapiens
ccaacagatcactctcactagccaat

SEQ ID NO: 117374 - DNA, 26 bp, Homo sapiens
caacagatcactctcactagccaata

SEQ ID NO: 117375 - DNA, 26 bp, Homo sapiens
aacagatcactctcactagccaatat

SEQ ID NO: 117376 - DNA, 26 bp, Homo sapiens
acagatcactctcactagccaatatg

SEQ ID NO: 117377 - DNA, 26 bp, Homo sapiens
cagatcactctcactagccaatatga

SEQ ID NO: 117378 - DNA, 26 bp, Homo sapiens
agatcactctcactagccaatatgag

SEQ ID NO: 117379 - DNA, 26 bp, Homo sapiens
gatcactctcactagccaatatgaga

SEQ ID NO: 117380 - DNA, 26 bp, Homo sapiens
atcactctcactagccaatatgagac

SEQ ID NO: 117381 - DNA, 26 bp, Homo sapiens
tcactctcactagccaatatgagaca

SEQ ID NO: 117382 - DNA, 26 bp, Homo sapiens
cactctcactagccaatatgagacac

SEQ ID NO: 117383 - DNA, 26 bp, Homo sapiens
actctcactagccaatatgagacaca

SEQ ID NO: 117384 - DNA, 26 bp, Homo sapiens
ctctcactagccaatatgagacacag

SEQ ID NO: 117385 - DNA, 26 bp, Homo sapiens
tctcactagccaatatgagacacagt

SEQ ID NO: 117386 - DNA, 26 bp, Homo sapiens
ctcactagccaatatgagacacagtc

SEQ ID NO: 117387 - DNA, 26 bp, Homo sapiens
tcactagccaatatgagacacagtca

SEQ ID NO: 117388 - DNA, 26 bp, Homo sapiens
cactagccaatatgagacacagtcag

SEQ ID NO: 117389 - DNA, 26 bp, Homo sapiens
actagccaatatgagacacagtcagt

SEQ ID NO: 117390 - DNA, 26 bp, Homo sapiens
ctagccaatatgagacacagtcagtt

SEQ ID NO: 117391 - DNA, 26 bp, Homo sapiens
tagccaatatgagacacagtcagttt

SEQ ID NO: 117392 - DNA, 26 bp, Homo sapiens
agccaatatgagacacagtcagtttc

SEQ ID NO: 117393 - DNA, 26 bp, Homo sapiens
gccaatatgagacacagtcagtttcc

SEQ ID NO: 117394 - DNA, 26 bp, Homo sapiens
ccaatatgagacacagtcagtttccc

SEQ ID NO: 117395 - DNA, 26 bp, Homo sapiens
caatatgagacacagtcagtttccct

SEQ ID NO: 117396 - DNA, 26 bp, Homo sapiens
aatatgagacacagtcagtttcccta

SEQ ID NO: 117397 - DNA, 26 bp, Homo sapiens
atatgagacacagtcagtttccctaa

SEQ ID NO: 117398 - DNA, 26 bp, Homo sapiens
tatgagacacagtcagtttccctaac

SEQ ID NO: 117399 - DNA, 26 bp, Homo sapiens
atgagacacagtcagtttccctaact

SEQ ID NO: 117400 - DNA, 26 bp, Homo sapiens
tgagacacagtcagtttccctaactc

SEQ ID NO: 117401 - DNA, 26 bp, Homo sapiens
gagacacagtcagtttccctaactct

SEQ ID NO: 117402 - DNA, 26 bp, Homo sapiens
agacacagtcagtttccctaactctg

SEQ ID NO: 117403 - DNA, 26 bp, Homo sapiens
gacacagtcagtttccctaactctgt

SEQ ID NO: 117404 - DNA, 26 bp, Homo sapiens
acacagtcagtttccctaactctgtg

SEQ ID NO: 117405 - DNA, 26 bp, Homo sapiens
cacagtcagtttccctaactctgtgc

SEQ ID NO: 117406 - DNA, 26 bp, Homo sapiens
acagtcagtttccctaactctgtgcc

SEQ ID NO: 117407 - DNA, 26 bp, Homo sapiens
cagtcagtttccctaactctgtgcca

SEQ ID NO: 117408 - DNA, 26 bp, Homo sapiens
agtcagtttccctaactctgtgccag

SEQ ID NO: 117409 - DNA, 26 bp, Homo sapiens
gtcagtttccctaactctgtgccagc

SEQ ID NO: 117410 - DNA, 26 bp, Homo sapiens
tcagtttccctaactctgtgccagct

SEQ ID NO: 117411 - DNA, 26 bp, Homo sapiens
cagtttccctaactctgtgccagctc

SEQ ID NO: 117412 - DNA, 26 bp, Homo sapiens
agtttccctaactctgtgccagctca

SEQ ID NO: 117413 - DNA, 26 bp, Homo sapiens
gtttccctaactctgtgccagctcac

SEQ ID NO: 117414 - DNA, 26 bp, Homo sapiens
tttccctaactctgtgccagctcact

SEQ ID NO: 117415 - DNA, 26 bp, Homo sapiens
ttccctaactctgtgccagctcactg

SEQ ID NO: 117416 - DNA, 26 bp, Homo sapiens
tccctaactctgtgccagctcactgt

SEQ ID NO: 117417 - DNA, 26 bp, Homo sapiens
ccctaactctgtgccagctcactgtc

SEQ ID NO: 117418 - DNA, 26 bp, Homo sapiens
cctaactctgtgccagctcactgtcc

SEQ ID NO: 117419 - DNA, 26 bp, Homo sapiens
ctaactctgtgccagctcactgtcct

SEQ ID NO: 117420 - DNA, 26 bp, Homo sapiens
taactctgtgccagctcactgtcctg

SEQ ID NO: 117421 - DNA, 26 bp, Homo sapiens
aactctgtgccagctcactgtcctgt

SEQ ID NO: 117422 - DNA, 26 bp, Homo sapiens
actctgtgccagctcactgtcctgtt

SEQ ID NO: 117423 - DNA, 26 bp, Homo sapiens
ctctgtgccagctcactgtcctgttc

SEQ ID NO: 117424 - DNA, 26 bp, Homo sapiens
tctgtgccagctcactgtcctgttct

SEQ ID NO: 117425 - DNA, 26 bp, Homo sapiens
ctgtgccagctcactgtcctgttctt

SEQ ID NO: 117426 - DNA, 26 bp, Homo sapiens
tgtgccagctcactgtcctgttcttc

SEQ ID NO: 117427 - DNA, 26 bp, Homo sapiens
gtgccagctcactgtcctgttcttcc

SEQ ID NO: 117428 - DNA, 26 bp, Homo sapiens
tgccagctcactgtcctgttcttcct

SEQ ID NO: 117429 - DNA, 26 bp, Homo sapiens
gccagctcactgtcctgttcttccta

SEQ ID NO: 117430 - DNA, 26 bp, Homo sapiens
ccagctcactgtcctgttcttcctat

SEQ ID NO: 117431 - DNA, 26 bp, Homo sapiens
cagctcactgtcctgttcttcctatg

SEQ ID NO: 117432 - DNA, 26 bp, Homo sapiens
agctcactgtcctgttcttcctatga

SEQ ID NO: 117433 - DNA, 26 bp, Homo sapiens
gctcactgtcctgttcttcctatgac

SEQ ID NO: 117434 - DNA, 26 bp, Homo sapiens
ctcactgtcctgttcttcctatgaca

SEQ ID NO: 117435 - DNA, 26 bp, Homo sapiens
tcactgtcctgttcttcctatgacag

SEQ ID NO: 117436 - DNA, 26 bp, Homo sapiens
cactgtcctgttcttcctatgacaga

SEQ ID NO: 117437 - DNA, 26 bp, Homo sapiens
actgtcctgttcttcctatgacagag

SEQ ID NO: 117438 - DNA, 26 bp, Homo sapiens
ctgtcctgttcttcctatgacagagt

SEQ ID NO: 117439 - DNA, 26 bp, Homo sapiens
tgtcctgttcttcctatgacagagtt

SEQ ID NO: 117440 - DNA, 26 bp, Homo sapiens
gtcctgttcttcctatgacagagttg

SEQ ID NO: 117441 - DNA, 26 bp, Homo sapiens
tcctgttcttcctatgacagagttga

SEQ ID NO: 117442 - DNA, 26 bp, Homo sapiens
cctgttcttcctatgacagagttgaa

SEQ ID NO: 117443 - DNA, 26 bp, Homo sapiens
ctgttcttcctatgacagagttgaaa

SEQ ID NO: 117444 - DNA, 26 bp, Homo sapiens
tgttcttcctatgacagagttgaaac

SEQ ID NO: 117445 - DNA, 26 bp, Homo sapiens
gttcttcctatgacagagttgaaaca

SEQ ID NO: 117446 - DNA, 26 bp, Homo sapiens
ttcttcctatgacagagttgaaacaa

SEQ ID NO: 117447 - DNA, 26 bp, Homo sapiens
tcttcctatgacagagttgaaacaag

SEQ ID NO: 117448 - DNA, 26 bp, Homo sapiens
cttcctatgacagagttgaaacaaga

SEQ ID NO: 117449 - DNA, 26 bp, Homo sapiens
ttcctatgacagagttgaaacaagaa

SEQ ID NO: 117450 - DNA, 26 bp, Homo sapiens
tcctatgacagagttgaaacaagaac

SEQ ID NO: 117451 - DNA, 26 bp, Homo sapiens
cctatgacagagttgaaacaagaacc

SEQ ID NO: 117452 - DNA, 26 bp, Homo sapiens
ctatgacagagttgaaacaagaacct

SEQ ID NO: 117453 - DNA, 26 bp, Homo sapiens
tatgacagagttgaaacaagaacctt

SEQ ID NO: 117454 - DNA, 26 bp, Homo sapiens
atgacagagttgaaacaagaacctta

SEQ ID NO: 117455 - DNA, 26 bp, Homo sapiens
tgacagagttgaaacaagaaccttat

SEQ ID NO: 117456 - DNA, 26 bp, Homo sapiens
gacagagttgaaacaagaaccttata

SEQ ID NO: 117457 - DNA, 26 bp, Homo sapiens
acagagttgaaacaagaaccttatag

SEQ ID NO: 117458 - DNA, 26 bp, Homo sapiens
cagagttgaaacaagaaccttatagt

SEQ ID NO: 117459 - DNA, 26 bp, Homo sapiens
agagttgaaacaagaaccttatagtt

SEQ ID NO: 117460 - DNA, 26 bp, Homo sapiens
gagttgaaacaagaaccttatagttt

SEQ ID NO: 117461 - DNA, 26 bp, Homo sapiens
agttgaaacaagaaccttatagtttt

SEQ ID NO: 117462 - DNA, 26 bp, Homo sapiens
gttgaaacaagaaccttatagttttc

SEQ ID NO: 117463 - DNA, 26 bp, Homo sapiens
ttgaaacaagaaccttatagttttcc

SEQ ID NO: 117464 - DNA, 26 bp, Homo sapiens
tgaaacaagaaccttatagttttcct

SEQ ID NO: 117465 - DNA, 26 bp, Homo sapiens
gaaacaagaaccttatagttttcctt

SEQ ID NO: 117466 - DNA, 26 bp, Homo sapiens
aaacaagaaccttatagttttccttt

SEQ ID NO: 117467 - DNA, 26 bp, Homo sapiens
aacaagaaccttatagttttcctttg

SEQ ID NO: 117468 - DNA, 26 bp, Homo sapiens
acaagaaccttatagttttcctttga

SEQ ID NO: 117469 - DNA, 26 bp, Homo sapiens
caagaaccttatagttttcctttgaa

SEQ ID NO: 117470 - DNA, 26 bp, Homo sapiens
aagaaccttatagttttcctttgaac

SEQ ID NO: 117471 - DNA, 26 bp, Homo sapiens
agaaccttatagttttcctttgaaca

SEQ ID NO: 117472 - DNA, 26 bp, Homo sapiens
gaaccttatagttttcctttgaacaa

SEQ ID NO: 117473 - DNA, 26 bp, Homo sapiens
aaccttatagttttcctttgaacaac

SEQ ID NO: 117474 - DNA, 26 bp, Homo sapiens
accttatagttttcctttgaacaact

SEQ ID NO: 117475 - DNA, 26 bp, Homo sapiens
ccttatagttttcctttgaacaactt

SEQ ID NO: 117476 - DNA, 26 bp, Homo sapiens
cttatagttttcctttgaacaacttt

SEQ ID NO: 117477 - DNA, 26 bp, Homo sapiens
ttatagttttcctttgaacaactttt

SEQ ID NO: 117478 - DNA, 26 bp, Homo sapiens
tatagttttcctttgaacaactttta

SEQ ID NO: 117479 - DNA, 26 bp, Homo sapiens
atagttttcctttgaacaacttttat

SEQ ID NO: 117480 - DNA, 26 bp, Homo sapiens
tagttttcctttgaacaacttttatt

SEQ ID NO: 117481 - DNA, 26 bp, Homo sapiens
agttttcctttgaacaacttttattg

SEQ ID NO: 117482 - DNA, 26 bp, Homo sapiens
gttttcctttgaacaacttttattgt

SEQ ID NO: 117483 - DNA, 26 bp, Homo sapiens
ttttcctttgaacaacttttattgtt

SEQ ID NO: 117484 - DNA, 26 bp, Homo sapiens
tttcctttgaacaacttttattgtta

SEQ ID NO: 117485 - DNA, 26 bp, Homo sapiens
ttcctttgaacaacttttattgttag

SEQ ID NO: 117486 - DNA, 26 bp, Homo sapiens
tcctttgaacaacttttattgttagt

SEQ ID NO: 117487 - DNA, 26 bp, Homo sapiens
cctttgaacaacttttattgttagta

SEQ ID NO: 117488 - DNA, 26 bp, Homo sapiens
ctttgaacaacttttattgttagtaa

SEQ ID NO: 117489 - DNA, 26 bp, Homo sapiens
tttgaacaacttttattgttagtaaa

SEQ ID NO: 117490 - DNA, 26 bp, Homo sapiens
ttgaacaacttttattgttagtaaaa

SEQ ID NO: 117491 - DNA, 26 bp, Homo sapiens
tgaacaacttttattgttagtaaaat

SEQ ID NO: 117492 - DNA, 26 bp, Homo sapiens
gaacaacttttattgttagtaaaatt

SEQ ID NO: 117493 - DNA, 26 bp, Homo sapiens
aacaacttttattgttagtaaaattc

SEQ ID NO: 117494 - DNA, 26 bp, Homo sapiens
acaacttttattgttagtaaaattca

SEQ ID NO: 117495 - DNA, 26 bp, Homo sapiens
caacttttattgttagtaaaattcaa

SEQ ID NO: 117496 - DNA, 26 bp, Homo sapiens
aacttttattgttagtaaaattcaac

SEQ ID NO: 117497 - DNA, 26 bp, Homo sapiens
acttttattgttagtaaaattcaaca

SEQ ID NO: 117498 - DNA, 26 bp, Homo sapiens
cttttattgttagtaaaattcaacat

SEQ ID NO: 117499 - DNA, 26 bp, Homo sapiens
ttttattgttagtaaaattcaacatt

SEQ ID NO: 117500 - DNA, 26 bp, Homo sapiens
tttattgttagtaaaattcaacattt

SEQ ID NO: 117501 - DNA, 26 bp, Homo sapiens
ttattgttagtaaaattcaacatttt

SEQ ID NO: 117502 - DNA, 26 bp, Homo sapiens
tattgttagtaaaattcaacattttt

SEQ ID NO: 117503 - DNA, 26 bp, Homo sapiens
attgttagtaaaattcaacattttta

SEQ ID NO: 117504 - DNA, 26 bp, Homo sapiens
ttgttagtaaaattcaacatttttaa

SEQ ID NO: 117505 - DNA, 26 bp, Homo sapiens
tgttagtaaaattcaacatttttaat

SEQ ID NO: 117506 - DNA, 26 bp, Homo sapiens
gttagtaaaattcaacatttttaatc

SEQ ID NO: 117507 - DNA, 26 bp, Homo sapiens
ttagtaaaattcaacatttttaatct

SEQ ID NO: 117508 - DNA, 26 bp, Homo sapiens
tagtaaaattcaacatttttaatctc

SEQ ID NO: 117509 - DNA, 26 bp, Homo sapiens
agtaaaattcaacatttttaatctca

SEQ ID NO: 117510 - DNA, 26 bp, Homo sapiens
gtaaaattcaacatttttaatctcat

SEQ ID NO: 117511 - DNA, 26 bp, Homo sapiens
taaaattcaacatttttaatctcata

SEQ ID NO: 117512 - DNA, 26 bp, Homo sapiens
aaaattcaacatttttaatctcatat

SEQ ID NO: 117513 - DNA, 26 bp, Homo sapiens
aaattcaacatttttaatctcatatt

SEQ ID NO: 117514 - DNA, 26 bp, Homo sapiens
aattcaacatttttaatctcatattt

SEQ ID NO: 117515 - DNA, 26 bp, Homo sapiens
attcaacatttttaatctcatatttt

SEQ ID NO: 117516 - DNA, 26 bp, Homo sapiens
ttcaacatttttaatctcatattttt

SEQ ID NO: 117517 - DNA, 26 bp, Homo sapiens
tcaacatttttaatctcatatttttg

SEQ ID NO: 117518 - DNA, 26 bp, Homo sapiens
caacatttttaatctcatatttttgt

SEQ ID NO: 117519 - DNA, 26 bp, Homo sapiens
aacatttttaatctcatatttttgtc

SEQ ID NO: 117520 - DNA, 26 bp, Homo sapiens
acatttttaatctcatatttttgtct

SEQ ID NO: 117521 - DNA, 26 bp, Homo sapiens
catttttaatctcatatttttgtcta

SEQ ID NO: 117522 - DNA, 26 bp, Homo sapiens
atttttaatctcatatttttgtctat

SEQ ID NO: 117523 - DNA, 26 bp, Homo sapiens
tttttaatctcatatttttgtctatt

SEQ ID NO: 117524 - DNA, 26 bp, Homo sapiens
ttttaatctcatatttttgtctattt

SEQ ID NO: 117525 - DNA, 26 bp, Homo sapiens
tttaatctcatatttttgtctattta

SEQ ID NO: 117526 - DNA, 26 bp, Homo sapiens
ttaatctcatatttttgtctatttaa

SEQ ID NO: 117527 - DNA, 26 bp, Homo sapiens
taatctcatatttttgtctatttaaa

SEQ ID NO: 117528 - DNA, 26 bp, Homo sapiens
aatctcatatttttgtctatttaaaa

SEQ ID NO: 117529 - DNA, 26 bp, Homo sapiens
atctcatatttttgtctatttaaaaa

SEQ ID NO: 117530 - DNA, 26 bp, Homo sapiens
tctcatatttttgtctatttaaaaaa

SEQ ID NO: 117531 - DNA, 26 bp, Homo sapiens
ctcatatttttgtctatttaaaaaat

SEQ ID NO: 117532 - DNA, 26 bp, Homo sapiens
tcatatttttgtctatttaaaaaatg

SEQ ID NO: 117533 - DNA, 26 bp, Homo sapiens
catatttttgtctatttaaaaaatgt

SEQ ID NO: 117534 - DNA, 26 bp, Homo sapiens
atatttttgtctatttaaaaaatgtg

SEQ ID NO: 117535 - DNA, 26 bp, Homo sapiens
tatttttgtctatttaaaaaatgtgg

SEQ ID NO: 117536 - DNA, 26 bp, Homo sapiens
atttttgtctatttaaaaaatgtggc

SEQ ID NO: 117537 - DNA, 26 bp, Homo sapiens
tttttgtctatttaaaaaatgtggcg

SEQ ID NO: 117538 - DNA, 26 bp, Homo sapiens
ttttgtctatttaaaaaatgtggcgt

SEQ ID NO: 117539 - DNA, 26 bp, Homo sapiens
tttgtctatttaaaaaatgtggcgtt

SEQ ID NO: 117540 - DNA, 26 bp, Homo sapiens
ttgtctatttaaaaaatgtggcgtta

SEQ ID NO: 117541 - DNA, 26 bp, Homo sapiens
tgtctatttaaaaaatgtggcgttaa

SEQ ID NO: 117542 - DNA, 26 bp, Homo sapiens
gtctatttaaaaaatgtggcgttaat

SEQ ID NO: 117543 - DNA, 26 bp, Homo sapiens
tctatttaaaaaatgtggcgttaata

SEQ ID NO: 117544 - DNA, 26 bp, Homo sapiens
ctatttaaaaaatgtggcgttaataa

SEQ ID NO: 117545 - DNA, 26 bp, Homo sapiens
tatttaaaaaatgtggcgttaataac

SEQ ID NO: 117546 - DNA, 26 bp, Homo sapiens
atttaaaaaatgtggcgttaataaca

SEQ ID NO: 117547 - DNA, 26 bp, Homo sapiens
tttaaaaaatgtggcgttaataacat

SEQ ID NO: 117548 - DNA, 26 bp, Homo sapiens
ttaaaaaatgtggcgttaataacatt

SEQ ID NO: 117549 - DNA, 26 bp, Homo sapiens
taaaaaatgtggcgttaataacatta

SEQ ID NO: 117550 - DNA, 26 bp, Homo sapiens
aaaaaatgtggcgttaataacattaa

SEQ ID NO: 117551 - DNA, 26 bp, Homo sapiens
aaaaatgtggcgttaataacattaag

SEQ ID NO: 117552 - DNA, 26 bp, Homo sapiens
aaaatgtggcgttaataacattaagc

SEQ ID NO: 117553 - DNA, 26 bp, Homo sapiens
aaatgtggcgttaataacattaagcc

SEQ ID NO: 117554 - DNA, 26 bp, Homo sapiens
aatgtggcgttaataacattaagcca

SEQ ID NO: 117555 - DNA, 26 bp, Homo sapiens
atgtggcgttaataacattaagccaa

SEQ ID NO: 117556 - DNA, 26 bp, Homo sapiens
tgtggcgttaataacattaagccaag

SEQ ID NO: 117557 - DNA, 26 bp, Homo sapiens
gtggcgttaataacattaagccaaga

SEQ ID NO: 117558 - DNA, 26 bp, Homo sapiens
tggcgttaataacattaagccaagag

SEQ ID NO: 117559 - DNA, 26 bp, Homo sapiens
ggcgttaataacattaagccaagagc

SEQ ID NO: 117560 - DNA, 26 bp, Homo sapiens
gcgttaataacattaagccaagagcc

SEQ ID NO: 117561 - DNA, 26 bp, Homo sapiens
cgttaataacattaagccaagagcca

SEQ ID NO: 117562 - DNA, 26 bp, Homo sapiens
gttaataacattaagccaagagccaa

SEQ ID NO: 117563 - DNA, 26 bp, Homo sapiens
ttaataacattaagccaagagccaaa

SEQ ID NO: 117564 - DNA, 26 bp, Homo sapiens
taataacattaagccaagagccaaat

SEQ ID NO: 117565 - DNA, 26 bp, Homo sapiens
aataacattaagccaagagccaaatc

SEQ ID NO: 117566 - DNA, 26 bp, Homo sapiens
ataacattaagccaagagccaaatca

SEQ ID NO: 117567 - DNA, 26 bp, Homo sapiens
taacattaagccaagagccaaatcag

SEQ ID NO: 117568 - DNA, 26 bp, Homo sapiens
aacattaagccaagagccaaatcagg

SEQ ID NO: 117569 - DNA, 26 bp, Homo sapiens
acattaagccaagagccaaatcagga

SEQ ID NO: 117570 - DNA, 26 bp, Homo sapiens
cattaagccaagagccaaatcaggaa

SEQ ID NO: 117571 - DNA, 26 bp, Homo sapiens
attaagccaagagccaaatcaggaat

SEQ ID NO: 117572 - DNA, 26 bp, Homo sapiens
ttaagccaagagccaaatcaggaatg

SEQ ID NO: 117573 - DNA, 26 bp, Homo sapiens
taagccaagagccaaatcaggaatgc

SEQ ID NO: 117574 - DNA, 26 bp, Homo sapiens
aagccaagagccaaatcaggaatgca

SEQ ID NO: 117575 - DNA, 26 bp, Homo sapiens
agccaagagccaaatcaggaatgcaa

SEQ ID NO: 117576 - DNA, 26 bp, Homo sapiens
gccaagagccaaatcaggaatgcaat

SEQ ID NO: 117577 - DNA, 26 bp, Homo sapiens
ccaagagccaaatcaggaatgcaatc

SEQ ID NO: 117578 - DNA, 26 bp, Homo sapiens
caagagccaaatcaggaatgcaatcc

SEQ ID NO: 117579 - DNA, 26 bp, Homo sapiens
aagagccaaatcaggaatgcaatccc

SEQ ID NO: 117580 - DNA, 26 bp, Homo sapiens
agagccaaatcaggaatgcaatccca

SEQ ID NO: 117581 - DNA, 26 bp, Homo sapiens
gagccaaatcaggaatgcaatcccat

SEQ ID NO: 117582 - DNA, 26 bp, Homo sapiens
agccaaatcaggaatgcaatcccatt

SEQ ID NO: 117583 - DNA, 26 bp, Homo sapiens
gccaaatcaggaatgcaatcccattc

SEQ ID NO: 117584 - DNA, 26 bp, Homo sapiens
ccaaatcaggaatgcaatcccattca

SEQ ID NO: 117585 - DNA, 26 bp, Homo sapiens
caaatcaggaatgcaatcccattcac

SEQ ID NO: 117586 - DNA, 26 bp, Homo sapiens
aaatcaggaatgcaatcccattcaca

SEQ ID NO: 117587 - DNA, 26 bp, Homo sapiens
aatcaggaatgcaatcccattcacaa

SEQ ID NO: 117588 - DNA, 26 bp, Homo sapiens
atcaggaatgcaatcccattcacaat

SEQ ID NO: 117589 - DNA, 26 bp, Homo sapiens
tcaggaatgcaatcccattcacaatt

SEQ ID NO: 117590 - DNA, 26 bp, Homo sapiens
caggaatgcaatcccattcacaattg

SEQ ID NO: 117591 - DNA, 26 bp, Homo sapiens
aggaatgcaatcccattcacaattgc

SEQ ID NO: 117592 - DNA, 26 bp, Homo sapiens
ggaatgcaatcccattcacaattgcc

SEQ ID NO: 117593 - DNA, 26 bp, Homo sapiens
gaatgcaatcccattcacaattgcca

SEQ ID NO: 117594 - DNA, 26 bp, Homo sapiens
aatgcaatcccattcacaattgccac

SEQ ID NO: 117595 - DNA, 26 bp, Homo sapiens
atgcaatcccattcacaattgccaca

SEQ ID NO: 117596 - DNA, 26 bp, Homo sapiens
tgcaatcccattcacaattgccacaa

SEQ ID NO: 117597 - DNA, 26 bp, Homo sapiens
gcaatcccattcacaattgccacaag

SEQ ID NO: 117598 - DNA, 26 bp, Homo sapiens
caatcccattcacaattgccacaaga

SEQ ID NO: 117599 - DNA, 26 bp, Homo sapiens
aatcccattcacaattgccacaagaa

SEQ ID NO: 117600 - DNA, 26 bp, Homo sapiens
atcccattcacaattgccacaagaag

SEQ ID NO: 117601 - DNA, 26 bp, Homo sapiens
tcccattcacaattgccacaagaaga

SEQ ID NO: 117602 - DNA, 26 bp, Homo sapiens
cccattcacaattgccacaagaagac

SEQ ID NO: 117603 - DNA, 26 bp, Homo sapiens
ccattcacaattgccacaagaagact

SEQ ID NO: 117604 - DNA, 26 bp, Homo sapiens
cattcacaattgccacaagaagacta

SEQ ID NO: 117605 - DNA, 26 bp, Homo sapiens
attcacaattgccacaagaagactaa

SEQ ID NO: 117606 - DNA, 26 bp, Homo sapiens
ttcacaattgccacaagaagactaaa

SEQ ID NO: 117607 - DNA, 26 bp, Homo sapiens
tcacaattgccacaagaagactaaaa

SEQ ID NO: 117608 - DNA, 26 bp, Homo sapiens
cacaattgccacaagaagactaaaat

SEQ ID NO: 117609 - DNA, 26 bp, Homo sapiens
acaattgccacaagaagactaaaata

SEQ ID NO: 117610 - DNA, 26 bp, Homo sapiens
caattgccacaagaagactaaaatac

SEQ ID NO: 117611 - DNA, 26 bp, Homo sapiens
aattgccacaagaagactaaaatacc

SEQ ID NO: 117612 - DNA, 26 bp, Homo sapiens
attgccacaagaagactaaaatacct

SEQ ID NO: 117613 - DNA, 26 bp, Homo sapiens
ttgccacaagaagactaaaataccta

SEQ ID NO: 117614 - DNA, 26 bp, Homo sapiens
tgccacaagaagactaaaatacctaa

SEQ ID NO: 117615 - DNA, 26 bp, Homo sapiens
gccacaagaagactaaaatacctaaa

SEQ ID NO: 117616 - DNA, 26 bp, Homo sapiens
ccacaagaagactaaaatacctaaaa

SEQ ID NO: 117617 - DNA, 26 bp, Homo sapiens
cacaagaagactaaaatacctaaaaa

SEQ ID NO: 117618 - DNA, 26 bp, Homo sapiens
acaagaagactaaaatacctaaaaat

SEQ ID NO: 117619 - DNA, 26 bp, Homo sapiens
caagaagactaaaatacctaaaaata

SEQ ID NO: 117620 - DNA, 26 bp, Homo sapiens
aagaagactaaaatacctaaaaatac

SEQ ID NO: 117621 - DNA, 26 bp, Homo sapiens
agaagactaaaatacctaaaaataca

SEQ ID NO: 117622 - DNA, 26 bp, Homo sapiens
gaagactaaaatacctaaaaatacag

SEQ ID NO: 117623 - DNA, 26 bp, Homo sapiens
aagactaaaatacctaaaaatacagc

SEQ ID NO: 117624 - DNA, 26 bp, Homo sapiens
agactaaaatacctaaaaatacagct

SEQ ID NO: 117625 - DNA, 26 bp, Homo sapiens
gactaaaatacctaaaaatacagcta

SEQ ID NO: 117626 - DNA, 26 bp, Homo sapiens
actaaaatacctaaaaatacagctaa

SEQ ID NO: 117627 - DNA, 26 bp, Homo sapiens
ctaaaatacctaaaaatacagctaac

SEQ ID NO: 117628 - DNA, 26 bp, Homo sapiens
taaaatacctaaaaatacagctaacc

SEQ ID NO: 117629 - DNA, 26 bp, Homo sapiens
aaaatacctaaaaatacagctaacca

SEQ ID NO: 117630 - DNA, 26 bp, Homo sapiens
aaatacctaaaaatacagctaaccaa

SEQ ID NO: 117631 - DNA, 26 bp, Homo sapiens
aatacctaaaaatacagctaaccaag

SEQ ID NO: 117632 - DNA, 26 bp, Homo sapiens
atacctaaaaatacagctaaccaagg

SEQ ID NO: 117633 - DNA, 26 bp, Homo sapiens
tacctaaaaatacagctaaccaagga

SEQ ID NO: 117634 - DNA, 26 bp, Homo sapiens
acctaaaaatacagctaaccaaggaa

SEQ ID NO: 117635 - DNA, 26 bp, Homo sapiens
cctaaaaatacagctaaccaaggaag

SEQ ID NO: 117636 - DNA, 26 bp, Homo sapiens
ctaaaaatacagctaaccaaggaagc

SEQ ID NO: 117637 - DNA, 26 bp, Homo sapiens
taaaaatacagctaaccaaggaagca

SEQ ID NO: 117638 - DNA, 26 bp, Homo sapiens
aaaaatacagctaaccaaggaagcaa

SEQ ID NO: 117639 - DNA, 26 bp, Homo sapiens
aaaatacagctaaccaaggaagcaaa

SEQ ID NO: 117640 - DNA, 26 bp, Homo sapiens
aaatacagctaaccaaggaagcaaaa

SEQ ID NO: 117641 - DNA, 26 bp, Homo sapiens
aatacagctaaccaaggaagcaaaag

SEQ ID NO: 117642 - DNA, 26 bp, Homo sapiens
atacagctaaccaaggaagcaaaaga

SEQ ID NO: 117643 - DNA, 26 bp, Homo sapiens
tacagctaaccaaggaagcaaaagat

SEQ ID NO: 117644 - DNA, 26 bp, Homo sapiens
acagctaaccaaggaagcaaaagata

SEQ ID NO: 117645 - DNA, 26 bp, Homo sapiens
cagctaaccaaggaagcaaaagatat

SEQ ID NO: 117646 - DNA, 26 bp, Homo sapiens
agctaaccaaggaagcaaaagatata

SEQ ID NO: 117647 - DNA, 26 bp, Homo sapiens
gctaaccaaggaagcaaaagatatat

SEQ ID NO: 117648 - DNA, 26 bp, Homo sapiens
ctaaccaaggaagcaaaagatatata

SEQ ID NO: 117649 - DNA, 26 bp, Homo sapiens
taaccaaggaagcaaaagatatatat

SEQ ID NO: 117650 - DNA, 26 bp, Homo sapiens
aaccaaggaagcaaaagatatatata

SEQ ID NO: 117651 - DNA, 26 bp, Homo sapiens
accaaggaagcaaaagatatatataa

SEQ ID NO: 117652 - DNA, 26 bp, Homo sapiens
ccaaggaagcaaaagatatatataat

SEQ ID NO: 117653 - DNA, 26 bp, Homo sapiens
caaggaagcaaaagatatatataatg

SEQ ID NO: 117654 - DNA, 26 bp, Homo sapiens
aaggaagcaaaagatatatataatga

SEQ ID NO: 117655 - DNA, 26 bp, Homo sapiens
aggaagcaaaagatatatataatgag

SEQ ID NO: 117656 - DNA, 26 bp, Homo sapiens
ggaagcaaaagatatatataatgaga

SEQ ID NO: 117657 - DNA, 26 bp, Homo sapiens
gaagcaaaagatatatataatgagaa

SEQ ID NO: 117658 - DNA, 26 bp, Homo sapiens
aagcaaaagatatatataatgagaat

SEQ ID NO: 117659 - DNA, 26 bp, Homo sapiens
agcaaaagatatatataatgagaatt

SEQ ID NO: 117660 - DNA, 26 bp, Homo sapiens
gcaaaagatatatataatgagaatta

SEQ ID NO: 117661 - DNA, 26 bp, Homo sapiens
caaaagatatatataatgagaattac

SEQ ID NO: 117662 - DNA, 26 bp, Homo sapiens
aaaagatatatataatgagaattaca

SEQ ID NO: 117663 - DNA, 26 bp, Homo sapiens
aaagatatatataatgagaattacaa

SEQ ID NO: 117664 - DNA, 26 bp, Homo sapiens
aagatatatataatgagaattacaag

SEQ ID NO: 117665 - DNA, 26 bp, Homo sapiens
agatatatataatgagaattacaaga

SEQ ID NO: 117666 - DNA, 26 bp, Homo sapiens
gatatatataatgagaattacaagat

SEQ ID NO: 117667 - DNA, 26 bp, Homo sapiens
atatatataatgagaattacaagata

SEQ ID NO: 117668 - DNA, 26 bp, Homo sapiens
tatatataatgagaattacaagatac

SEQ ID NO: 117669 - DNA, 26 bp, Homo sapiens
atatataatgagaattacaagatacc

SEQ ID NO: 117670 - DNA, 26 bp, Homo sapiens
tatataatgagaattacaagataccc

SEQ ID NO: 117671 - DNA, 26 bp, Homo sapiens
atataatgagaattacaagatacccc

SEQ ID NO: 117672 - DNA, 26 bp, Homo sapiens
tataatgagaattacaagatacccct

SEQ ID NO: 117673 - DNA, 26 bp, Homo sapiens
ataatgagaattacaagatacccctg

SEQ ID NO: 117674 - DNA, 26 bp, Homo sapiens
taatgagaattacaagatacccctga

SEQ ID NO: 117675 - DNA, 26 bp, Homo sapiens
aatgagaattacaagatacccctgaa

SEQ ID NO: 117676 - DNA, 26 bp, Homo sapiens
atgagaattacaagatacccctgaaa

SEQ ID NO: 117677 - DNA, 26 bp, Homo sapiens
tgagaattacaagatacccctgaaag

SEQ ID NO: 117678 - DNA, 26 bp, Homo sapiens
gagaattacaagatacccctgaaaga

SEQ ID NO: 117679 - DNA, 26 bp, Homo sapiens
agaattacaagatacccctgaaagaa

SEQ ID NO: 117680 - DNA, 26 bp, Homo sapiens
gaattacaagatacccctgaaagaaa

SEQ ID NO: 117681 - DNA, 26 bp, Homo sapiens
aattacaagatacccctgaaagaaat

SEQ ID NO: 117682 - DNA, 26 bp, Homo sapiens
attacaagatacccctgaaagaaata

SEQ ID NO: 117683 - DNA, 26 bp, Homo sapiens
ttacaagatacccctgaaagaaataa

SEQ ID NO: 117684 - DNA, 26 bp, Homo sapiens
tacaagatacccctgaaagaaataag

SEQ ID NO: 117685 - DNA, 26 bp, Homo sapiens
acaagatacccctgaaagaaataaga

SEQ ID NO: 117686 - DNA, 26 bp, Homo sapiens
caagatacccctgaaagaaataagag

SEQ ID NO: 117687 - DNA, 26 bp, Homo sapiens
aagatacccctgaaagaaataagaga

SEQ ID NO: 117688 - DNA, 26 bp, Homo sapiens
agatacccctgaaagaaataagagat

SEQ ID NO: 117689 - DNA, 26 bp, Homo sapiens
gatacccctgaaagaaataagagatg

SEQ ID NO: 117690 - DNA, 26 bp, Homo sapiens
atacccctgaaagaaataagagatgt

SEQ ID NO: 117691 - DNA, 26 bp, Homo sapiens
tacccctgaaagaaataagagatgtc

SEQ ID NO: 117692 - DNA, 26 bp, Homo sapiens
acccctgaaagaaataagagatgtca

SEQ ID NO: 117693 - DNA, 26 bp, Homo sapiens
cccctgaaagaaataagagatgtcac

SEQ ID NO: 117694 - DNA, 26 bp, Homo sapiens
ccctgaaagaaataagagatgtcaca

SEQ ID NO: 117695 - DNA, 26 bp, Homo sapiens
cctgaaagaaataagagatgtcacaa

SEQ ID NO: 117696 - DNA, 26 bp, Homo sapiens
ctgaaagaaataagagatgtcacaaa

SEQ ID NO: 117697 - DNA, 26 bp, Homo sapiens
tgaaagaaataagagatgtcacaaac

SEQ ID NO: 117698 - DNA, 26 bp, Homo sapiens
gaaagaaataagagatgtcacaaaca

SEQ ID NO: 117699 - DNA, 26 bp, Homo sapiens
aaagaaataagagatgtcacaaacaa

SEQ ID NO: 117700 - DNA, 26 bp, Homo sapiens
aagaaataagagatgtcacaaacaaa

SEQ ID NO: 117701 - DNA, 26 bp, Homo sapiens
agaaataagagatgtcacaaacaaat

SEQ ID NO: 117702 - DNA, 26 bp, Homo sapiens
gaaataagagatgtcacaaacaaatg

SEQ ID NO: 117703 - DNA, 26 bp, Homo sapiens
aaataagagatgtcacaaacaaatgg

SEQ ID NO: 117704 - DNA, 26 bp, Homo sapiens
aataagagatgtcacaaacaaatgga

SEQ ID NO: 117705 - DNA, 26 bp, Homo sapiens
ataagagatgtcacaaacaaatggaa

SEQ ID NO: 117706 - DNA, 26 bp, Homo sapiens
taagagatgtcacaaacaaatggaaa

SEQ ID NO: 117707 - DNA, 26 bp, Homo sapiens
aagagatgtcacaaacaaatggaaaa

SEQ ID NO: 117708 - DNA, 26 bp, Homo sapiens
agagatgtcacaaacaaatggaaaaa

SEQ ID NO: 117709 - DNA, 26 bp, Homo sapiens
gagatgtcacaaacaaatggaaaaac

SEQ ID NO: 117710 - DNA, 26 bp, Homo sapiens
agatgtcacaaacaaatggaaaaaca

SEQ ID NO: 117711 - DNA, 26 bp, Homo sapiens
gatgtcacaaacaaatggaaaaacat

SEQ ID NO: 117712 - DNA, 26 bp, Homo sapiens
atgtcacaaacaaatggaaaaacatt

SEQ ID NO: 117713 - DNA, 26 bp, Homo sapiens
tgtcacaaacaaatggaaaaacattc

SEQ ID NO: 117714 - DNA, 26 bp, Homo sapiens
gtcacaaacaaatggaaaaacattcc

SEQ ID NO: 117715 - DNA, 26 bp, Homo sapiens
tcacaaacaaatggaaaaacattcca

SEQ ID NO: 117716 - DNA, 26 bp, Homo sapiens
cacaaacaaatggaaaaacattccat

SEQ ID NO: 117717 - DNA, 26 bp, Homo sapiens
acaaacaaatggaaaaacattccatg

SEQ ID NO: 117718 - DNA, 26 bp, Homo sapiens
caaacaaatggaaaaacattccatgc

SEQ ID NO: 117719 - DNA, 26 bp, Homo sapiens
aaacaaatggaaaaacattccatgct

SEQ ID NO: 117720 - DNA, 26 bp, Homo sapiens
aacaaatggaaaaacattccatgctc

SEQ ID NO: 117721 - DNA, 26 bp, Homo sapiens
acaaatggaaaaacattccatgctca

SEQ ID NO: 117722 - DNA, 26 bp, Homo sapiens
caaatggaaaaacattccatgctcat

SEQ ID NO: 117723 - DNA, 26 bp, Homo sapiens
aaatggaaaaacattccatgctcatg

SEQ ID NO: 117724 - DNA, 26 bp, Homo sapiens
aatggaaaaacattccatgctcatga

SEQ ID NO: 117725 - DNA, 26 bp, Homo sapiens
atggaaaaacattccatgctcatgaa

SEQ ID NO: 117726 - DNA, 26 bp, Homo sapiens
tggaaaaacattccatgctcatgaat

SEQ ID NO: 117727 - DNA, 26 bp, Homo sapiens
ggaaaaacattccatgctcatgaata

SEQ ID NO: 117728 - DNA, 26 bp, Homo sapiens
gaaaaacattccatgctcatgaatag

SEQ ID NO: 117729 - DNA, 26 bp, Homo sapiens
aaaaacattccatgctcatgaatagg

SEQ ID NO: 117730 - DNA, 26 bp, Homo sapiens
aaaacattccatgctcatgaatagga

SEQ ID NO: 117731 - DNA, 26 bp, Homo sapiens
aaacattccatgctcatgaataggag

SEQ ID NO: 117732 - DNA, 26 bp, Homo sapiens
aacattccatgctcatgaataggagc

SEQ ID NO: 117733 - DNA, 26 bp, Homo sapiens
acattccatgctcatgaataggagca

SEQ ID NO: 117734 - DNA, 26 bp, Homo sapiens
cattccatgctcatgaataggagcac

SEQ ID NO: 117735 - DNA, 26 bp, Homo sapiens
attccatgctcatgaataggagcaca

SEQ ID NO: 117736 - DNA, 26 bp, Homo sapiens
ttccatgctcatgaataggagcacag

SEQ ID NO: 117737 - DNA, 26 bp, Homo sapiens
tccatgctcatgaataggagcacagc

SEQ ID NO: 117738 - DNA, 26 bp, Homo sapiens
ccatgctcatgaataggagcacagct

SEQ ID NO: 117739 - DNA, 26 bp, Homo sapiens
catgctcatgaataggagcacagctt

SEQ ID NO: 117740 - DNA, 26 bp, Homo sapiens
atgctcatgaataggagcacagcttt

SEQ ID NO: 117741 - DNA, 26 bp, Homo sapiens
tgctcatgaataggagcacagctttg

SEQ ID NO: 117742 - DNA, 26 bp, Homo sapiens
gctcatgaataggagcacagctttgt

SEQ ID NO: 117743 - DNA, 26 bp, Homo sapiens
ctcatgaataggagcacagctttgta

SEQ ID NO: 117744 - DNA, 26 bp, Homo sapiens
tcatgaataggagcacagctttgtaa

SEQ ID NO: 117745 - DNA, 26 bp, Homo sapiens
catgaataggagcacagctttgtaaa

SEQ ID NO: 117746 - DNA, 26 bp, Homo sapiens
atgaataggagcacagctttgtaaat

SEQ ID NO: 117747 - DNA, 26 bp, Homo sapiens
tgaataggagcacagctttgtaaata

SEQ ID NO: 117748 - DNA, 26 bp, Homo sapiens
gaataggagcacagctttgtaaataa

SEQ ID NO: 117749 - DNA, 26 bp, Homo sapiens
aataggagcacagctttgtaaataaa

SEQ ID NO: 117750 - DNA, 26 bp, Homo sapiens
ataggagcacagctttgtaaataaag

SEQ ID NO: 117751 - DNA, 26 bp, Homo sapiens
taggagcacagctttgtaaataaagg

SEQ ID NO: 117752 - DNA, 26 bp, Homo sapiens
aggagcacagctttgtaaataaagga

SEQ ID NO: 117753 - DNA, 26 bp, Homo sapiens
ggagcacagctttgtaaataaaggac

SEQ ID NO: 117754 - DNA, 26 bp, Homo sapiens
gagcacagctttgtaaataaaggaca

SEQ ID NO: 117755 - DNA, 26 bp, Homo sapiens
agcacagctttgtaaataaaggacat

SEQ ID NO: 117756 - DNA, 26 bp, Homo sapiens
gcacagctttgtaaataaaggacata

SEQ ID NO: 117757 - DNA, 26 bp, Homo sapiens
cacagctttgtaaataaaggacatag

SEQ ID NO: 117758 - DNA, 26 bp, Homo sapiens
acagctttgtaaataaaggacatagg

SEQ ID NO: 117759 - DNA, 26 bp, Homo sapiens
cagctttgtaaataaaggacataggg

SEQ ID NO: 117760 - DNA, 26 bp, Homo sapiens
agctttgtaaataaaggacatagggt

SEQ ID NO: 117761 - DNA, 26 bp, Homo sapiens
gctttgtaaataaaggacatagggtg

SEQ ID NO: 117762 - DNA, 26 bp, Homo sapiens
ctttgtaaataaaggacatagggtga

SEQ ID NO: 117763 - DNA, 26 bp, Homo sapiens
tttgtaaataaaggacatagggtgag

SEQ ID NO: 117764 - DNA, 26 bp, Homo sapiens
ttgtaaataaaggacatagggtgagg

SEQ ID NO: 117765 - DNA, 26 bp, Homo sapiens
tgtaaataaaggacatagggtgagga

SEQ ID NO: 117766 - DNA, 26 bp, Homo sapiens
gtaaataaaggacatagggtgaggaa

SEQ ID NO: 117767 - DNA, 26 bp, Homo sapiens
taaataaaggacatagggtgaggaag

SEQ ID NO: 117768 - DNA, 26 bp, Homo sapiens
aaataaaggacatagggtgaggaagc

SEQ ID NO: 117769 - DNA, 26 bp, Homo sapiens
aataaaggacatagggtgaggaagcc

SEQ ID NO: 117770 - DNA, 26 bp, Homo sapiens
ataaaggacatagggtgaggaagccg

SEQ ID NO: 117771 - DNA, 26 bp, Homo sapiens
taaaggacatagggtgaggaagccgg

SEQ ID NO: 117772 - DNA, 26 bp, Homo sapiens
aaaggacatagggtgaggaagccggg

SEQ ID NO: 117773 - DNA, 26 bp, Homo sapiens
aaggacatagggtgaggaagccgggt

SEQ ID NO: 117774 - DNA, 26 bp, Homo sapiens
aggacatagggtgaggaagccgggtt

SEQ ID NO: 117775 - DNA, 26 bp, Homo sapiens
ggacatagggtgaggaagccgggttg

SEQ ID NO: 117776 - DNA, 26 bp, Homo sapiens
gacatagggtgaggaagccgggttgt

SEQ ID NO: 117777 - DNA, 26 bp, Homo sapiens
acatagggtgaggaagccgggttgtt

SEQ ID NO: 117778 - DNA, 26 bp, Homo sapiens
catagggtgaggaagccgggttgttt

SEQ ID NO: 117779 - DNA, 26 bp, Homo sapiens
atagggtgaggaagccgggttgtttt

SEQ ID NO: 117780 - DNA, 26 bp, Homo sapiens
tagggtgaggaagccgggttgtttta

SEQ ID NO: 117781 - DNA, 26 bp, Homo sapiens
agggtgaggaagccgggttgttttaa

SEQ ID NO: 117782 - DNA, 26 bp, Homo sapiens
gggtgaggaagccgggttgttttaag

SEQ ID NO: 117783 - DNA, 26 bp, Homo sapiens
ggtgaggaagccgggttgttttaaga

SEQ ID NO: 117784 - DNA, 26 bp, Homo sapiens
gtgaggaagccgggttgttttaagaa

SEQ ID NO: 117785 - DNA, 26 bp, Homo sapiens
tgaggaagccgggttgttttaagaag

SEQ ID NO: 117786 - DNA, 26 bp, Homo sapiens
gaggaagccgggttgttttaagaagc

SEQ ID NO: 117787 - DNA, 26 bp, Homo sapiens
aggaagccgggttgttttaagaagcc

SEQ ID NO: 117788 - DNA, 26 bp, Homo sapiens
ggaagccgggttgttttaagaagcct

SEQ ID NO: 117789 - DNA, 26 bp, Homo sapiens
gaagccgggttgttttaagaagcctg

SEQ ID NO: 117790 - DNA, 26 bp, Homo sapiens
aagccgggttgttttaagaagcctgt

SEQ ID NO: 117791 - DNA, 26 bp, Homo sapiens
agccgggttgttttaagaagcctgtg

SEQ ID NO: 117792 - DNA, 26 bp, Homo sapiens
gccgggttgttttaagaagcctgtgt

SEQ ID NO: 117793 - DNA, 26 bp, Homo sapiens
ccgggttgttttaagaagcctgtgtc

SEQ ID NO: 117794 - DNA, 26 bp, Homo sapiens
cgggttgttttaagaagcctgtgtcc

SEQ ID NO: 117795 - DNA, 26 bp, Homo sapiens
gggttgttttaagaagcctgtgtccc

SEQ ID NO: 117796 - DNA, 26 bp, Homo sapiens
ggttgttttaagaagcctgtgtcccc

SEQ ID NO: 117797 - DNA, 26 bp, Homo sapiens
gttgttttaagaagcctgtgtcccct

SEQ ID NO: 117798 - DNA, 26 bp, Homo sapiens
ttgttttaagaagcctgtgtcccctg

SEQ ID NO: 117799 - DNA, 26 bp, Homo sapiens
tgttttaagaagcctgtgtcccctgt

SEQ ID NO: 117800 - DNA, 26 bp, Homo sapiens
gttttaagaagcctgtgtcccctgtg

SEQ ID NO: 117801 - DNA, 26 bp, Homo sapiens
ttttaagaagcctgtgtcccctgtga

SEQ ID NO: 117802 - DNA, 26 bp, Homo sapiens
tttaagaagcctgtgtcccctgtgaa

SEQ ID NO: 117803 - DNA, 26 bp, Homo sapiens
ttaagaagcctgtgtcccctgtgaaa

SEQ ID NO: 117804 - DNA, 26 bp, Homo sapiens
taagaagcctgtgtcccctgtgaaaa

SEQ ID NO: 117805 - DNA, 26 bp, Homo sapiens
aagaagcctgtgtcccctgtgaaaag

SEQ ID NO: 117806 - DNA, 26 bp, Homo sapiens
agaagcctgtgtcccctgtgaaaagg

SEQ ID NO: 117807 - DNA, 26 bp, Homo sapiens
gaagcctgtgtcccctgtgaaaaggc

SEQ ID NO: 117808 - DNA, 26 bp, Homo sapiens
aagcctgtgtcccctgtgaaaaggcc

SEQ ID NO: 117809 - DNA, 26 bp, Homo sapiens
agcctgtgtcccctgtgaaaaggccc

SEQ ID NO: 117810 - DNA, 26 bp, Homo sapiens
gcctgtgtcccctgtgaaaaggccca

SEQ ID NO: 117811 - DNA, 26 bp, Homo sapiens
cctgtgtcccctgtgaaaaggcccat

SEQ ID NO: 117812 - DNA, 26 bp, Homo sapiens
ctgtgtcccctgtgaaaaggcccatg

SEQ ID NO: 117813 - DNA, 26 bp, Homo sapiens
tgtgtcccctgtgaaaaggcccatgg

SEQ ID NO: 117814 - DNA, 26 bp, Homo sapiens
gtgtcccctgtgaaaaggcccatggc

SEQ ID NO: 117815 - DNA, 26 bp, Homo sapiens
tgtcccctgtgaaaaggcccatggca

SEQ ID NO: 117816 - DNA, 26 bp, Homo sapiens
gtcccctgtgaaaaggcccatggcat

SEQ ID NO: 117817 - DNA, 26 bp, Homo sapiens
tcccctgtgaaaaggcccatggcata

SEQ ID NO: 117818 - DNA, 26 bp, Homo sapiens
cccctgtgaaaaggcccatggcatat

SEQ ID NO: 117819 - DNA, 26 bp, Homo sapiens
ccctgtgaaaaggcccatggcatatc

SEQ ID NO: 117820 - DNA, 26 bp, Homo sapiens
cctgtgaaaaggcccatggcatatct

SEQ ID NO: 117821 - DNA, 26 bp, Homo sapiens
ctgtgaaaaggcccatggcatatctt

SEQ ID NO: 117822 - DNA, 26 bp, Homo sapiens
tgtgaaaaggcccatggcatatcttg

SEQ ID NO: 117823 - DNA, 26 bp, Homo sapiens
gtgaaaaggcccatggcatatcttgt

SEQ ID NO: 117824 - DNA, 26 bp, Homo sapiens
tgaaaaggcccatggcatatcttgta

SEQ ID NO: 117825 - DNA, 26 bp, Homo sapiens
gaaaaggcccatggcatatcttgtag

SEQ ID NO: 117826 - DNA, 26 bp, Homo sapiens
aaaaggcccatggcatatcttgtaga

SEQ ID NO: 117827 - DNA, 26 bp, Homo sapiens
aaaggcccatggcatatcttgtagaa

SEQ ID NO: 117828 - DNA, 26 bp, Homo sapiens
aaggcccatggcatatcttgtagaat

SEQ ID NO: 117829 - DNA, 26 bp, Homo sapiens
aggcccatggcatatcttgtagaatt

SEQ ID NO: 117830 - DNA, 26 bp, Homo sapiens
ggcccatggcatatcttgtagaatta

SEQ ID NO: 117831 - DNA, 26 bp, Homo sapiens
gcccatggcatatcttgtagaattac

SEQ ID NO: 117832 - DNA, 26 bp, Homo sapiens
cccatggcatatcttgtagaattaca

SEQ ID NO: 117833 - DNA, 26 bp, Homo sapiens
ccatggcatatcttgtagaattacaa

SEQ ID NO: 117834 - DNA, 26 bp, Homo sapiens
catggcatatcttgtagaattacaag

SEQ ID NO: 117835 - DNA, 26 bp, Homo sapiens
atggcatatcttgtagaattacaagg

SEQ ID NO: 117836 - DNA, 26 bp, Homo sapiens
tggcatatcttgtagaattacaagga

SEQ ID NO: 117837 - DNA, 26 bp, Homo sapiens
ggcatatcttgtagaattacaaggag

SEQ ID NO: 117838 - DNA, 26 bp, Homo sapiens
gcatatcttgtagaattacaaggagt

SEQ ID NO: 117839 - DNA, 26 bp, Homo sapiens
catatcttgtagaattacaaggagtt

SEQ ID NO: 117840 - DNA, 26 bp, Homo sapiens
atatcttgtagaattacaaggagttc

SEQ ID NO: 117841 - DNA, 26 bp, Homo sapiens
tatcttgtagaattacaaggagttca

SEQ ID NO: 117842 - DNA, 26 bp, Homo sapiens
atcttgtagaattacaaggagttcat

SEQ ID NO: 117843 - DNA, 26 bp, Homo sapiens
tcttgtagaattacaaggagttcatt

SEQ ID NO: 117844 - DNA, 26 bp, Homo sapiens
cttgtagaattacaaggagttcattc

SEQ ID NO: 117845 - DNA, 26 bp, Homo sapiens
ttgtagaattacaaggagttcattct

SEQ ID NO: 117846 - DNA, 26 bp, Homo sapiens
tgtagaattacaaggagttcattctg

SEQ ID NO: 117847 - DNA, 26 bp, Homo sapiens
gtagaattacaaggagttcattctgt

SEQ ID NO: 117848 - DNA, 26 bp, Homo sapiens
tagaattacaaggagttcattctgta

SEQ ID NO: 117849 - DNA, 26 bp, Homo sapiens
agaattacaaggagttcattctgtag

SEQ ID NO: 117850 - DNA, 26 bp, Homo sapiens
gaattacaaggagttcattctgtagc

SEQ ID NO: 117851 - DNA, 26 bp, Homo sapiens
aattacaaggagttcattctgtagca

SEQ ID NO: 117852 - DNA, 26 bp, Homo sapiens
attacaaggagttcattctgtagcag

SEQ ID NO: 117853 - DNA, 26 bp, Homo sapiens
ttacaaggagttcattctgtagcagg

SEQ ID NO: 117854 - DNA, 26 bp, Homo sapiens
tacaaggagttcattctgtagcagga

SEQ ID NO: 117855 - DNA, 26 bp, Homo sapiens
acaaggagttcattctgtagcaggat

SEQ ID NO: 117856 - DNA, 26 bp, Homo sapiens
caaggagttcattctgtagcaggatg

SEQ ID NO: 117857 - DNA, 26 bp, Homo sapiens
aaggagttcattctgtagcaggatga

SEQ ID NO: 117858 - DNA, 26 bp, Homo sapiens
aggagttcattctgtagcaggatgag

SEQ ID NO: 117859 - DNA, 26 bp, Homo sapiens
ggagttcattctgtagcaggatgagc

SEQ ID NO: 117860 - DNA, 26 bp, Homo sapiens
gagttcattctgtagcaggatgagct

SEQ ID NO: 117861 - DNA, 26 bp, Homo sapiens
agttcattctgtagcaggatgagctg

SEQ ID NO: 117862 - DNA, 26 bp, Homo sapiens
gttcattctgtagcaggatgagctgc

SEQ ID NO: 117863 - DNA, 26 bp, Homo sapiens
ttcattctgtagcaggatgagctgca

SEQ ID NO: 117864 - DNA, 26 bp, Homo sapiens
tcattctgtagcaggatgagctgcag

SEQ ID NO: 117865 - DNA, 26 bp, Homo sapiens
cattctgtagcaggatgagctgcaga

SEQ ID NO: 117866 - DNA, 26 bp, Homo sapiens
attctgtagcaggatgagctgcagac

SEQ ID NO: 117867 - DNA, 26 bp, Homo sapiens
ttctgtagcaggatgagctgcagaca

SEQ ID NO: 117868 - DNA, 26 bp, Homo sapiens
tctgtagcaggatgagctgcagacaa

SEQ ID NO: 117869 - DNA, 26 bp, Homo sapiens
ctgtagcaggatgagctgcagacaaa

SEQ ID NO: 117870 - DNA, 26 bp, Homo sapiens
tgtagcaggatgagctgcagacaaaa

SEQ ID NO: 117871 - DNA, 26 bp, Homo sapiens
gtagcaggatgagctgcagacaaaac

SEQ ID NO: 117872 - DNA, 26 bp, Homo sapiens
tagcaggatgagctgcagacaaaact

SEQ ID NO: 117873 - DNA, 26 bp, Homo sapiens
agcaggatgagctgcagacaaaactt

SEQ ID NO: 117874 - DNA, 26 bp, Homo sapiens
gcaggatgagctgcagacaaaacttc

SEQ ID NO: 117875 - DNA, 26 bp, Homo sapiens
caggatgagctgcagacaaaacttct

SEQ ID NO: 117876 - DNA, 26 bp, Homo sapiens
aggatgagctgcagacaaaacttctc

SEQ ID NO: 117877 - DNA, 26 bp, Homo sapiens
ggatgagctgcagacaaaacttctca

SEQ ID NO: 117878 - DNA, 26 bp, Homo sapiens
gatgagctgcagacaaaacttctcag

SEQ ID NO: 117879 - DNA, 26 bp, Homo sapiens
atgagctgcagacaaaacttctcaga

SEQ ID NO: 117880 - DNA, 26 bp, Homo sapiens
tgagctgcagacaaaacttctcagac

SEQ ID NO: 117881 - DNA, 26 bp, Homo sapiens
gagctgcagacaaaacttctcagaca

SEQ ID NO: 117882 - DNA, 26 bp, Homo sapiens
agctgcagacaaaacttctcagacac

SEQ ID NO: 117883 - DNA, 26 bp, Homo sapiens
gctgcagacaaaacttctcagacacc

SEQ ID NO: 117884 - DNA, 26 bp, Homo sapiens
ctgcagacaaaacttctcagacaccg

SEQ ID NO: 117885 - DNA, 26 bp, Homo sapiens
tgcagacaaaacttctcagacaccga

SEQ ID NO: 117886 - DNA, 26 bp, Homo sapiens
gcagacaaaacttctcagacaccgag

SEQ ID NO: 117887 - DNA, 26 bp, Homo sapiens
cagacaaaacttctcagacaccgagt

SEQ ID NO: 117888 - DNA, 26 bp, Homo sapiens
agacaaaacttctcagacaccgagtt

SEQ ID NO: 117889 - DNA, 26 bp, Homo sapiens
gacaaaacttctcagacaccgagttg

SEQ ID NO: 117890 - DNA, 26 bp, Homo sapiens
acaaaacttctcagacaccgagttgg

SEQ ID NO: 117891 - DNA, 26 bp, Homo sapiens
caaaacttctcagacaccgagttgga

SEQ ID NO: 117892 - DNA, 26 bp, Homo sapiens
aaaacttctcagacaccgagttggag

SEQ ID NO: 117893 - DNA, 26 bp, Homo sapiens
aaacttctcagacaccgagttggaga

SEQ ID NO: 117894 - DNA, 26 bp, Homo sapiens
aacttctcagacaccgagttggagaa

SEQ ID NO: 117895 - DNA, 26 bp, Homo sapiens
acttctcagacaccgagttggagaag

SEQ ID NO: 117896 - DNA, 26 bp, Homo sapiens
cttctcagacaccgagttggagaagg

SEQ ID NO: 117897 - DNA, 26 bp, Homo sapiens
ttctcagacaccgagttggagaagga

SEQ ID NO: 117898 - DNA, 26 bp, Homo sapiens
tctcagacaccgagttggagaaggaa

SEQ ID NO: 117899 - DNA, 26 bp, Homo sapiens
ctcagacaccgagttggagaaggaag

SEQ ID NO: 117900 - DNA, 26 bp, Homo sapiens
tcagacaccgagttggagaaggaagg

SEQ ID NO: 117901 - DNA, 26 bp, Homo sapiens
cagacaccgagttggagaaggaaggg

SEQ ID NO: 117902 - DNA, 26 bp, Homo sapiens
agacaccgagttggagaaggaagggc

SEQ ID NO: 117903 - DNA, 26 bp, Homo sapiens
gacaccgagttggagaaggaagggct

SEQ ID NO: 117904 - DNA, 26 bp, Homo sapiens
acaccgagttggagaaggaagggctt

SEQ ID NO: 117905 - DNA, 26 bp, Homo sapiens
caccgagttggagaaggaagggcttt

SEQ ID NO: 117906 - DNA, 26 bp, Homo sapiens
accgagttggagaaggaagggctttt

SEQ ID NO: 117907 - DNA, 26 bp, Homo sapiens
ccgagttggagaaggaagggcttttt

SEQ ID NO: 117908 - DNA, 26 bp, Homo sapiens
cgagttggagaaggaagggctttttt

SEQ ID NO: 117909 - DNA, 26 bp, Homo sapiens
gagttggagaaggaagggcttttttc

SEQ ID NO: 117910 - DNA, 26 bp, Homo sapiens
agttggagaaggaagggcttttttca

SEQ ID NO: 117911 - DNA, 26 bp, Homo sapiens
gttggagaaggaagggcttttttcag

SEQ ID NO: 117912 - DNA, 26 bp, Homo sapiens
ttggagaaggaagggcttttttcagc

SEQ ID NO: 117913 - DNA, 26 bp, Homo sapiens
tggagaaggaagggcttttttcagct

SEQ ID NO: 117914 - DNA, 26 bp, Homo sapiens
ggagaaggaagggcttttttcagctg

SEQ ID NO: 117915 - DNA, 26 bp, Homo sapiens
gagaaggaagggcttttttcagctgg

SEQ ID NO: 117916 - DNA, 26 bp, Homo sapiens
agaaggaagggcttttttcagctggt

SEQ ID NO: 117917 - DNA, 26 bp, Homo sapiens
gaaggaagggcttttttcagctggtg

SEQ ID NO: 117918 - DNA, 26 bp, Homo sapiens
aaggaagggcttttttcagctggtgg

SEQ ID NO: 117919 - DNA, 26 bp, Homo sapiens
aggaagggcttttttcagctggtggc

SEQ ID NO: 117920 - DNA, 26 bp, Homo sapiens
ggaagggcttttttcagctggtggca

SEQ ID NO: 117921 - DNA, 26 bp, Homo sapiens
gaagggcttttttcagctggtggcat

SEQ ID NO: 117922 - DNA, 26 bp, Homo sapiens
aagggcttttttcagctggtggcatc

SEQ ID NO: 117923 - DNA, 26 bp, Homo sapiens
agggcttttttcagctggtggcatca

SEQ ID NO: 117924 - DNA, 26 bp, Homo sapiens
gggcttttttcagctggtggcatcag

SEQ ID NO: 117925 - DNA, 26 bp, Homo sapiens
ggcttttttcagctggtggcatcagc

SEQ ID NO: 117926 - DNA, 26 bp, Homo sapiens
gcttttttcagctggtggcatcagca

SEQ ID NO: 117927 - DNA, 26 bp, Homo sapiens
cttttttcagctggtggcatcagcaa

SEQ ID NO: 117928 - DNA, 26 bp, Homo sapiens
ttttttcagctggtggcatcagcaag

SEQ ID NO: 117929 - DNA, 26 bp, Homo sapiens
tttttcagctggtggcatcagcaagc

SEQ ID NO: 117930 - DNA, 26 bp, Homo sapiens
ttttcagctggtggcatcagcaagct

SEQ ID NO: 117931 - DNA, 26 bp, Homo sapiens
tttcagctggtggcatcagcaagctg

SEQ ID NO: 117932 - DNA, 26 bp, Homo sapiens
ttcagctggtggcatcagcaagctgc

SEQ ID NO: 117933 - DNA, 26 bp, Homo sapiens
tcagctggtggcatcagcaagctgct

SEQ ID NO: 117934 - DNA, 26 bp, Homo sapiens
cagctggtggcatcagcaagctgctg

SEQ ID NO: 117935 - DNA, 26 bp, Homo sapiens
agctggtggcatcagcaagctgctgc

SEQ ID NO: 117936 - DNA, 26 bp, Homo sapiens
gctggtggcatcagcaagctgctgcc

SEQ ID NO: 117937 - DNA, 26 bp, Homo sapiens
ctggtggcatcagcaagctgctgcct

SEQ ID NO: 117938 - DNA, 26 bp, Homo sapiens
tggtggcatcagcaagctgctgcctt

SEQ ID NO: 117939 - DNA, 26 bp, Homo sapiens
ggtggcatcagcaagctgctgcctta

SEQ ID NO: 117940 - DNA, 26 bp, Homo sapiens
gtggcatcagcaagctgctgccttaa

SEQ ID NO: 117941 - DNA, 26 bp, Homo sapiens
tggcatcagcaagctgctgccttaaa

SEQ ID NO: 117942 - DNA, 26 bp, Homo sapiens
ggcatcagcaagctgctgccttaaaa

SEQ ID NO: 117943 - DNA, 26 bp, Homo sapiens
gcatcagcaagctgctgccttaaaat

SEQ ID NO: 117944 - DNA, 26 bp, Homo sapiens
catcagcaagctgctgccttaaaatc

SEQ ID NO: 117945 - DNA, 26 bp, Homo sapiens
atcagcaagctgctgccttaaaatcc

SEQ ID NO: 117946 - DNA, 26 bp, Homo sapiens
tcagcaagctgctgccttaaaatcca

SEQ ID NO: 117947 - DNA, 26 bp, Homo sapiens
cagcaagctgctgccttaaaatccaa

SEQ ID NO: 117948 - DNA, 26 bp, Homo sapiens
agcaagctgctgccttaaaatccaag

SEQ ID NO: 117949 - DNA, 26 bp, Homo sapiens
gcaagctgctgccttaaaatccaagc

SEQ ID NO: 117950 - DNA, 26 bp, Homo sapiens
caagctgctgccttaaaatccaagct

SEQ ID NO: 117951 - DNA, 26 bp, Homo sapiens
aagctgctgccttaaaatccaagctc

SEQ ID NO: 117952 - DNA, 26 bp, Homo sapiens
agctgctgccttaaaatccaagctcc

SEQ ID NO: 117953 - DNA, 26 bp, Homo sapiens
gctgctgccttaaaatccaagctcct

SEQ ID NO: 117954 - DNA, 26 bp, Homo sapiens
ctgctgccttaaaatccaagctcctt

SEQ ID NO: 117955 - DNA, 26 bp, Homo sapiens
tgctgccttaaaatccaagctccttg

SEQ ID NO: 117956 - DNA, 26 bp, Homo sapiens
gctgccttaaaatccaagctccttga

SEQ ID NO: 117957 - DNA, 26 bp, Homo sapiens
ctgccttaaaatccaagctccttgaa

SEQ ID NO: 117958 - DNA, 26 bp, Homo sapiens
tgccttaaaatccaagctccttgaat

SEQ ID NO: 117959 - DNA, 26 bp, Homo sapiens
gccttaaaatccaagctccttgaatg

SEQ ID NO: 117960 - DNA, 26 bp, Homo sapiens
ccttaaaatccaagctccttgaatgc

SEQ ID NO: 117961 - DNA, 26 bp, Homo sapiens
cttaaaatccaagctccttgaatgca

SEQ ID NO: 117962 - DNA, 26 bp, Homo sapiens
ttaaaatccaagctccttgaatgcac

SEQ ID NO: 117963 - DNA, 26 bp, Homo sapiens
taaaatccaagctccttgaatgcaca

SEQ ID NO: 117964 - DNA, 26 bp, Homo sapiens
aaaatccaagctccttgaatgcacaa

SEQ ID NO: 117965 - DNA, 26 bp, Homo sapiens
aaatccaagctccttgaatgcacaat

SEQ ID NO: 117966 - DNA, 26 bp, Homo sapiens
aatccaagctccttgaatgcacaatt

SEQ ID NO: 117967 - DNA, 26 bp, Homo sapiens
atccaagctccttgaatgcacaattt

SEQ ID NO: 117968 - DNA, 26 bp, Homo sapiens
tccaagctccttgaatgcacaatttc

SEQ ID NO: 117969 - DNA, 26 bp, Homo sapiens
ccaagctccttgaatgcacaatttct

SEQ ID NO: 117970 - DNA, 26 bp, Homo sapiens
caagctccttgaatgcacaatttctg

SEQ ID NO: 117971 - DNA, 26 bp, Homo sapiens
aagctccttgaatgcacaatttctgt

SEQ ID NO: 117972 - DNA, 26 bp, Homo sapiens
agctccttgaatgcacaatttctgtc

SEQ ID NO: 117973 - DNA, 26 bp, Homo sapiens
gctccttgaatgcacaatttctgtcc

SEQ ID NO: 117974 - DNA, 26 bp, Homo sapiens
ctccttgaatgcacaatttctgtccc

SEQ ID NO: 117975 - DNA, 26 bp, Homo sapiens
tccttgaatgcacaatttctgtccct

SEQ ID NO: 117976 - DNA, 26 bp, Homo sapiens
ccttgaatgcacaatttctgtccctt

SEQ ID NO: 117977 - DNA, 26 bp, Homo sapiens
cttgaatgcacaatttctgtcccttt

SEQ ID NO: 117978 - DNA, 26 bp, Homo sapiens
ttgaatgcacaatttctgtccctttt

SEQ ID NO: 117979 - DNA, 26 bp, Homo sapiens
tgaatgcacaatttctgtccctttta

SEQ ID NO: 117980 - DNA, 26 bp, Homo sapiens
gaatgcacaatttctgtcccttttaa

SEQ ID NO: 117981 - DNA, 26 bp, Homo sapiens
aatgcacaatttctgtcccttttaag

SEQ ID NO: 117982 - DNA, 26 bp, Homo sapiens
atgcacaatttctgtcccttttaagg

SEQ ID NO: 117983 - DNA, 26 bp, Homo sapiens
tgcacaatttctgtcccttttaaggg

SEQ ID NO: 117984 - DNA, 26 bp, Homo sapiens
gcacaatttctgtcccttttaagggc

SEQ ID NO: 117985 - DNA, 26 bp, Homo sapiens
cacaatttctgtcccttttaagggct

SEQ ID NO: 117986 - DNA, 26 bp, Homo sapiens
acaatttctgtcccttttaagggctc

SEQ ID NO: 117987 - DNA, 26 bp, Homo sapiens
caatttctgtcccttttaagggctca

SEQ ID NO: 117988 - DNA, 26 bp, Homo sapiens
aatttctgtcccttttaagggctcac

SEQ ID NO: 117989 - DNA, 26 bp, Homo sapiens
atttctgtcccttttaagggctcaca

SEQ ID NO: 117990 - DNA, 26 bp, Homo sapiens
tttctgtcccttttaagggctcacaa

SEQ ID NO: 117991 - DNA, 26 bp, Homo sapiens
ttctgtcccttttaagggctcacaac

SEQ ID NO: 117992 - DNA, 26 bp, Homo sapiens
tctgtcccttttaagggctcacaaca

SEQ ID NO: 117993 - DNA, 26 bp, Homo sapiens
ctgtcccttttaagggctcacaacac

SEQ ID NO: 117994 - DNA, 26 bp, Homo sapiens
tgtcccttttaagggctcacaacact

SEQ ID NO: 117995 - DNA, 26 bp, Homo sapiens
gtcccttttaagggctcacaacacta

SEQ ID NO: 117996 - DNA, 26 bp, Homo sapiens
tcccttttaagggctcacaacactaa

SEQ ID NO: 117997 - DNA, 26 bp, Homo sapiens
cccttttaagggctcacaacactaaa

SEQ ID NO: 117998 - DNA, 26 bp, Homo sapiens
ccttttaagggctcacaacactaaag

SEQ ID NO: 117999 - DNA, 26 bp, Homo sapiens
cttttaagggctcacaacactaaaga

SEQ ID NO: 118000 - DNA, 26 bp, Homo sapiens
ttttaagggctcacaacactaaagat

SEQ ID NO: 118001 - DNA, 26 bp, Homo sapiens
tttaagggctcacaacactaaagatt

SEQ ID NO: 118002 - DNA, 26 bp, Homo sapiens
ttaagggctcacaacactaaagattt

SEQ ID NO: 118003 - DNA, 26 bp, Homo sapiens
taagggctcacaacactaaagatttc

SEQ ID NO: 118004 - DNA, 26 bp, Homo sapiens
aagggctcacaacactaaagatttca

SEQ ID NO: 118005 - DNA, 26 bp, Homo sapiens
agggctcacaacactaaagatttcac

SEQ ID NO: 118006 - DNA, 26 bp, Homo sapiens
gggctcacaacactaaagatttcaca

SEQ ID NO: 118007 - DNA, 26 bp, Homo sapiens
ggctcacaacactaaagatttcacat

SEQ ID NO: 118008 - DNA, 26 bp, Homo sapiens
gctcacaacactaaagatttcacatg

SEQ ID NO: 118009 - DNA, 26 bp, Homo sapiens
ctcacaacactaaagatttcacatga

SEQ ID NO: 118010 - DNA, 26 bp, Homo sapiens
tcacaacactaaagatttcacatgaa

SEQ ID NO: 118011 - DNA, 26 bp, Homo sapiens
cacaacactaaagatttcacatgaaa

SEQ ID NO: 118012 - DNA, 26 bp, Homo sapiens
acaacactaaagatttcacatgaaag

SEQ ID NO: 118013 - DNA, 26 bp, Homo sapiens
caacactaaagatttcacatgaaagg

SEQ ID NO: 118014 - DNA, 26 bp, Homo sapiens
aacactaaagatttcacatgaaaggg

SEQ ID NO: 118015 - DNA, 26 bp, Homo sapiens
acactaaagatttcacatgaaagggt

SEQ ID NO: 118016 - DNA, 26 bp, Homo sapiens
cactaaagatttcacatgaaagggtc

SEQ ID NO: 118017 - DNA, 26 bp, Homo sapiens
actaaagatttcacatgaaagggtca

SEQ ID NO: 118018 - DNA, 26 bp, Homo sapiens
ctaaagatttcacatgaaagggtcat

SEQ ID NO: 118019 - DNA, 26 bp, Homo sapiens
taaagatttcacatgaaagggtcatg

SEQ ID NO: 118020 - DNA, 26 bp, Homo sapiens
aaagatttcacatgaaagggtcatga

SEQ ID NO: 118021 - DNA, 26 bp, Homo sapiens
aagatttcacatgaaagggtcatgat

SEQ ID NO: 118022 - DNA, 26 bp, Homo sapiens
agatttcacatgaaagggtcatgatt

SEQ ID NO: 118023 - DNA, 26 bp, Homo sapiens
gatttcacatgaaagggtcatgattg

SEQ ID NO: 118024 - DNA, 26 bp, Homo sapiens
atttcacatgaaagggtcatgattga

SEQ ID NO: 118025 - DNA, 26 bp, Homo sapiens
tttcacatgaaagggtcatgattgat

SEQ ID NO: 118026 - DNA, 26 bp, Homo sapiens
ttcacatgaaagggtcatgattgatt

SEQ ID NO: 118027 - DNA, 26 bp, Homo sapiens
tcacatgaaagggtcatgattgattt

SEQ ID NO: 118028 - DNA, 26 bp, Homo sapiens
cacatgaaagggtcatgattgatttg

SEQ ID NO: 118029 - DNA, 26 bp, Homo sapiens
acatgaaagggtcatgattgatttga

SEQ ID NO: 118030 - DNA, 26 bp, Homo sapiens
catgaaagggtcatgattgatttgag

SEQ ID NO: 118031 - DNA, 26 bp, Homo sapiens
atgaaagggtcatgattgatttgagc

SEQ ID NO: 118032 - DNA, 26 bp, Homo sapiens
tgaaagggtcatgattgatttgagca

SEQ ID NO: 118033 - DNA, 26 bp, Homo sapiens
gaaagggtcatgattgatttgagcaa

SEQ ID NO: 118034 - DNA, 26 bp, Homo sapiens
aaagggtcatgattgatttgagcaaa

SEQ ID NO: 118035 - DNA, 26 bp, Homo sapiens
aagggtcatgattgatttgagcaaac

SEQ ID NO: 118036 - DNA, 26 bp, Homo sapiens
agggtcatgattgatttgagcaaaca

SEQ ID NO: 118037 - DNA, 26 bp, Homo sapiens
gggtcatgattgatttgagcaaacag

SEQ ID NO: 118038 - DNA, 26 bp, Homo sapiens
ggtcatgattgatttgagcaaacagg

SEQ ID NO: 118039 - DNA, 26 bp, Homo sapiens
gtcatgattgatttgagcaaacaggc

SEQ ID NO: 118040 - DNA, 26 bp, Homo sapiens
tcatgattgatttgagcaaacaggcg

SEQ ID NO: 118041 - DNA, 26 bp, Homo sapiens
catgattgatttgagcaaacaggcgg

SEQ ID NO: 118042 - DNA, 26 bp, Homo sapiens
atgattgatttgagcaaacaggcggt

SEQ ID NO: 118043 - DNA, 26 bp, Homo sapiens
tgattgatttgagcaaacaggcggta

SEQ ID NO: 118044 - DNA, 26 bp, Homo sapiens
gattgatttgagcaaacaggcggtac

SEQ ID NO: 118045 - DNA, 26 bp, Homo sapiens
attgatttgagcaaacaggcggtaca

SEQ ID NO: 118046 - DNA, 26 bp, Homo sapiens
ttgatttgagcaaacaggcggtacat

SEQ ID NO: 118047 - DNA, 26 bp, Homo sapiens
tgatttgagcaaacaggcggtacatg

SEQ ID NO: 118048 - DNA, 26 bp, Homo sapiens
gatttgagcaaacaggcggtacatga

SEQ ID NO: 118049 - DNA, 26 bp, Homo sapiens
atttgagcaaacaggcggtacatgac

SEQ ID NO: 118050 - DNA, 26 bp, Homo sapiens
tttgagcaaacaggcggtacatgaca

SEQ ID NO: 118051 - DNA, 26 bp, Homo sapiens
ttgagcaaacaggcggtacatgacag

SEQ ID NO: 118052 - DNA, 26 bp, Homo sapiens
tgagcaaacaggcggtacatgacagg

SEQ ID NO: 118053 - DNA, 26 bp, Homo sapiens
gagcaaacaggcggtacatgacaggg

SEQ ID NO: 118054 - DNA, 26 bp, Homo sapiens
agcaaacaggcggtacatgacagggg

SEQ ID NO: 118055 - DNA, 26 bp, Homo sapiens
gcaaacaggcggtacatgacaggggc

SEQ ID NO: 118056 - DNA, 26 bp, Homo sapiens
caaacaggcggtacatgacaggggct

SEQ ID NO: 118057 - DNA, 26 bp, Homo sapiens
aaacaggcggtacatgacaggggctg

SEQ ID NO: 118058 - DNA, 26 bp, Homo sapiens
aacaggcggtacatgacaggggctgc

SEQ ID NO: 118059 - DNA, 26 bp, Homo sapiens
acaggcggtacatgacaggggctgca

SEQ ID NO: 118060 - DNA, 26 bp, Homo sapiens
caggcggtacatgacaggggctgcat

SEQ ID NO: 118061 - DNA, 26 bp, Homo sapiens
aggcggtacatgacaggggctgcatg

SEQ ID NO: 118062 - DNA, 26 bp, Homo sapiens
ggcggtacatgacaggggctgcatgc

SEQ ID NO: 118063 - DNA, 26 bp, Homo sapiens
gcggtacatgacaggggctgcatgca

SEQ ID NO: 118064 - DNA, 26 bp, Homo sapiens
cggtacatgacaggggctgcatgcac

SEQ ID NO: 118065 - DNA, 26 bp, Homo sapiens
ggtacatgacaggggctgcatgcact

SEQ ID NO: 118066 - DNA, 26 bp, Homo sapiens
gtacatgacaggggctgcatgcactg

SEQ ID NO: 118067 - DNA, 26 bp, Homo sapiens
tacatgacaggggctgcatgcactgg

SEQ ID NO: 118068 - DNA, 26 bp, Homo sapiens
acatgacaggggctgcatgcactggt

SEQ ID NO: 118069 - DNA, 26 bp, Homo sapiens
catgacaggggctgcatgcactggtg

SEQ ID NO: 118070 - DNA, 26 bp, Homo sapiens
atgacaggggctgcatgcactggtgg

SEQ ID NO: 118071 - DNA, 26 bp, Homo sapiens
tgacaggggctgcatgcactggtggt

SEQ ID NO: 118072 - DNA, 26 bp, Homo sapiens
gacaggggctgcatgcactggtggtc

SEQ ID NO: 118073 - DNA, 26 bp, Homo sapiens
acaggggctgcatgcactggtggtca

SEQ ID NO: 118074 - DNA, 26 bp, Homo sapiens
caggggctgcatgcactggtggtcag

SEQ ID NO: 118075 - DNA, 26 bp, Homo sapiens
aggggctgcatgcactggtggtcaga

SEQ ID NO: 118076 - DNA, 26 bp, Homo sapiens
ggggctgcatgcactggtggtcagag

SEQ ID NO: 118077 - DNA, 26 bp, Homo sapiens
gggctgcatgcactggtggtcagaga

SEQ ID NO: 118078 - DNA, 26 bp, Homo sapiens
ggctgcatgcactggtggtcagagag

SEQ ID NO: 118079 - DNA, 26 bp, Homo sapiens
gctgcatgcactggtggtcagagaga

SEQ ID NO: 118080 - DNA, 26 bp, Homo sapiens
ctgcatgcactggtggtcagagagaa

SEQ ID NO: 118081 - DNA, 26 bp, Homo sapiens
tgcatgcactggtggtcagagagaaa

SEQ ID NO: 118082 - DNA, 26 bp, Homo sapiens
gcatgcactggtggtcagagagaaac

SEQ ID NO: 118083 - DNA, 26 bp, Homo sapiens
catgcactggtggtcagagagaaaca

SEQ ID NO: 118084 - DNA, 26 bp, Homo sapiens
atgcactggtggtcagagagaaacag

SEQ ID NO: 118085 - DNA, 26 bp, Homo sapiens
tgcactggtggtcagagagaaacaga

SEQ ID NO: 118086 - DNA, 26 bp, Homo sapiens
gcactggtggtcagagagaaacagaa

SEQ ID NO: 118087 - DNA, 26 bp, Homo sapiens
cactggtggtcagagagaaacagaac

SEQ ID NO: 118088 - DNA, 26 bp, Homo sapiens
actggtggtcagagagaaacagaaca

SEQ ID NO: 118089 - DNA, 26 bp, Homo sapiens
ctggtggtcagagagaaacagaacaa

SEQ ID NO: 118090 - DNA, 26 bp, Homo sapiens
tggtggtcagagagaaacagaacaag

SEQ ID NO: 118091 - DNA, 26 bp, Homo sapiens
ggtggtcagagagaaacagaacaagg

SEQ ID NO: 118092 - DNA, 26 bp, Homo sapiens
gtggtcagagagaaacagaacaaggc

SEQ ID NO: 118093 - DNA, 26 bp, Homo sapiens
tggtcagagagaaacagaacaaggca

SEQ ID NO: 118094 - DNA, 26 bp, Homo sapiens
ggtcagagagaaacagaacaaggcag

SEQ ID NO: 118095 - DNA, 26 bp, Homo sapiens
gtcagagagaaacagaacaaggcagt

SEQ ID NO: 118096 - DNA, 26 bp, Homo sapiens
tcagagagaaacagaacaaggcagtg

SEQ ID NO: 118097 - DNA, 26 bp, Homo sapiens
cagagagaaacagaacaaggcagtga

SEQ ID NO: 118098 - DNA, 26 bp, Homo sapiens
agagagaaacagaacaaggcagtgag

SEQ ID NO: 118099 - DNA, 26 bp, Homo sapiens
gagagaaacagaacaaggcagtgagt

SEQ ID NO: 118100 - DNA, 26 bp, Homo sapiens
agagaaacagaacaaggcagtgagtt

SEQ ID NO: 118101 - DNA, 26 bp, Homo sapiens
gagaaacagaacaaggcagtgagttt

SEQ ID NO: 118102 - DNA, 26 bp, Homo sapiens
agaaacagaacaaggcagtgagtttc

SEQ ID NO: 118103 - DNA, 26 bp, Homo sapiens
gaaacagaacaaggcagtgagtttcc

SEQ ID NO: 118104 - DNA, 26 bp, Homo sapiens
aaacagaacaaggcagtgagtttcca

SEQ ID NO: 118105 - DNA, 26 bp, Homo sapiens
aacagaacaaggcagtgagtttccaa

SEQ ID NO: 118106 - DNA, 26 bp, Homo sapiens
acagaacaaggcagtgagtttccaaa

SEQ ID NO: 118107 - DNA, 26 bp, Homo sapiens
cagaacaaggcagtgagtttccaaat

SEQ ID NO: 118108 - DNA, 26 bp, Homo sapiens
agaacaaggcagtgagtttccaaatg

SEQ ID NO: 118109 - DNA, 26 bp, Homo sapiens
gaacaaggcagtgagtttccaaatgt

SEQ ID NO: 118110 - DNA, 26 bp, Homo sapiens
aacaaggcagtgagtttccaaatgtt

SEQ ID NO: 118111 - DNA, 26 bp, Homo sapiens
acaaggcagtgagtttccaaatgttc

SEQ ID NO: 118112 - DNA, 26 bp, Homo sapiens
caaggcagtgagtttccaaatgttct

SEQ ID NO: 118113 - DNA, 26 bp, Homo sapiens
aaggcagtgagtttccaaatgttctt

SEQ ID NO: 118114 - DNA, 26 bp, Homo sapiens
aggcagtgagtttccaaatgttcttc

SEQ ID NO: 118115 - DNA, 26 bp, Homo sapiens
ggcagtgagtttccaaatgttcttct

SEQ ID NO: 118116 - DNA, 26 bp, Homo sapiens
gcagtgagtttccaaatgttcttcta

SEQ ID NO: 118117 - DNA, 26 bp, Homo sapiens
cagtgagtttccaaatgttcttctat

SEQ ID NO: 118118 - DNA, 26 bp, Homo sapiens
agtgagtttccaaatgttcttctata

SEQ ID NO: 118119 - DNA, 26 bp, Homo sapiens
gtgagtttccaaatgttcttctatac

SEQ ID NO: 118120 - DNA, 26 bp, Homo sapiens
tgagtttccaaatgttcttctataca

SEQ ID NO: 118121 - DNA, 26 bp, Homo sapiens
gagtttccaaatgttcttctatacaa

SEQ ID NO: 118122 - DNA, 26 bp, Homo sapiens
agtttccaaatgttcttctatacaat

SEQ ID NO: 118123 - DNA, 26 bp, Homo sapiens
gtttccaaatgttcttctatacaatg

SEQ ID NO: 118124 - DNA, 26 bp, Homo sapiens
tttccaaatgttcttctatacaatgt

SEQ ID NO: 118125 - DNA, 26 bp, Homo sapiens
ttccaaatgttcttctatacaatgtc

SEQ ID NO: 118126 - DNA, 26 bp, Homo sapiens
tccaaatgttcttctatacaatgtct

SEQ ID NO: 118127 - DNA, 26 bp, Homo sapiens
ccaaatgttcttctatacaatgtctg

SEQ ID NO: 118128 - DNA, 26 bp, Homo sapiens
caaatgttcttctatacaatgtctgg

SEQ ID NO: 118129 - DNA, 26 bp, Homo sapiens
aaatgttcttctatacaatgtctgga

SEQ ID NO: 118130 - DNA, 26 bp, Homo sapiens
aatgttcttctatacaatgtctggaa

SEQ ID NO: 118131 - DNA, 26 bp, Homo sapiens
atgttcttctatacaatgtctggaat

SEQ ID NO: 118132 - DNA, 26 bp, Homo sapiens
tgttcttctatacaatgtctggaatc

SEQ ID NO: 118133 - DNA, 26 bp, Homo sapiens
gttcttctatacaatgtctggaatct

SEQ ID NO: 118134 - DNA, 26 bp, Homo sapiens
ttcttctatacaatgtctggaatcta

SEQ ID NO: 118135 - DNA, 26 bp, Homo sapiens
tcttctatacaatgtctggaatctat

SEQ ID NO: 118136 - DNA, 26 bp, Homo sapiens
cttctatacaatgtctggaatctatg

SEQ ID NO: 118137 - DNA, 26 bp, Homo sapiens
ttctatacaatgtctggaatctatga

SEQ ID NO: 118138 - DNA, 26 bp, Homo sapiens
tctatacaatgtctggaatctatgaa

SEQ ID NO: 118139 - DNA, 26 bp, Homo sapiens
ctatacaatgtctggaatctatgaat

SEQ ID NO: 118140 - DNA, 26 bp, Homo sapiens
tatacaatgtctggaatctatgaata

SEQ ID NO: 118141 - DNA, 26 bp, Homo sapiens
atacaatgtctggaatctatgaataa

SEQ ID NO: 118142 - DNA, 26 bp, Homo sapiens
tacaatgtctggaatctatgaataac

SEQ ID NO: 118143 - DNA, 26 bp, Homo sapiens
acaatgtctggaatctatgaataaca

SEQ ID NO: 118144 - DNA, 26 bp, Homo sapiens
caatgtctggaatctatgaataacat

SEQ ID NO: 118145 - DNA, 26 bp, Homo sapiens
aatgtctggaatctatgaataacatc

SEQ ID NO: 118146 - DNA, 26 bp, Homo sapiens
atgtctggaatctatgaataacatcg

SEQ ID NO: 118147 - DNA, 26 bp, Homo sapiens
tgtctggaatctatgaataacatcgg

SEQ ID NO: 118148 - DNA, 26 bp, Homo sapiens
gtctggaatctatgaataacatcggt

SEQ ID NO: 118149 - DNA, 26 bp, Homo sapiens
tctggaatctatgaataacatcggtt

SEQ ID NO: 118150 - DNA, 26 bp, Homo sapiens
ctggaatctatgaataacatcggttt

SEQ ID NO: 118151 - DNA, 26 bp, Homo sapiens
tggaatctatgaataacatcggtttc

SEQ ID NO: 118152 - DNA, 26 bp, Homo sapiens
ggaatctatgaataacatcggtttct

SEQ ID NO: 118153 - DNA, 26 bp, Homo sapiens
gaatctatgaataacatcggtttcta

SEQ ID NO: 118154 - DNA, 26 bp, Homo sapiens
aatctatgaataacatcggtttctaa

SEQ ID NO: 118155 - DNA, 26 bp, Homo sapiens
atctatgaataacatcggtttctaag

SEQ ID NO: 118156 - DNA, 26 bp, Homo sapiens
tctatgaataacatcggtttctaagt

SEQ ID NO: 118157 - DNA, 26 bp, Homo sapiens
ctatgaataacatcggtttctaagtt

SEQ ID NO: 118158 - DNA, 26 bp, Homo sapiens
tatgaataacatcggtttctaagtta

SEQ ID NO: 118159 - DNA, 26 bp, Homo sapiens
atgaataacatcggtttctaagttat

SEQ ID NO: 118160 - DNA, 26 bp, Homo sapiens
tgaataacatcggtttctaagttatg

SEQ ID NO: 118161 - DNA, 26 bp, Homo sapiens
gaataacatcggtttctaagttatga

SEQ ID NO: 118162 - DNA, 26 bp, Homo sapiens
aataacatcggtttctaagttatgag

SEQ ID NO: 118163 - DNA, 26 bp, Homo sapiens
ataacatcggtttctaagttatgagt

SEQ ID NO: 118164 - DNA, 26 bp, Homo sapiens
taacatcggtttctaagttatgagtt

SEQ ID NO: 118165 - DNA, 26 bp, Homo sapiens
aacatcggtttctaagttatgagttg

SEQ ID NO: 118166 - DNA, 26 bp, Homo sapiens
acatcggtttctaagttatgagttga

SEQ ID NO: 118167 - DNA, 26 bp, Homo sapiens
catcggtttctaagttatgagttgat

SEQ ID NO: 118168 - DNA, 26 bp, Homo sapiens
atcggtttctaagttatgagttgatt

SEQ ID NO: 118169 - DNA, 26 bp, Homo sapiens
tcggtttctaagttatgagttgattt

SEQ ID NO: 118170 - DNA, 26 bp, Homo sapiens
cggtttctaagttatgagttgatttt

SEQ ID NO: 118171 - DNA, 26 bp, Homo sapiens
ggtttctaagttatgagttgattttt

SEQ ID NO: 118172 - DNA, 26 bp, Homo sapiens
gtttctaagttatgagttgatttttt

SEQ ID NO: 118173 - DNA, 26 bp, Homo sapiens
tttctaagttatgagttgattttttt

SEQ ID NO: 118174 - DNA, 26 bp, Homo sapiens
ttctaagttatgagttgatttttttt

SEQ ID NO: 118175 - DNA, 26 bp, Homo sapiens
tctaagttatgagttgattttttttt

SEQ ID NO: 118176 - DNA, 26 bp, Homo sapiens
ctaagttatgagttgatttttttttt

SEQ ID NO: 118177 - DNA, 26 bp, Homo sapiens
taagttatgagttgattttttttttt

SEQ ID NO: 118178 - DNA, 26 bp, Homo sapiens
aagttatgagttgatttttttttttt

SEQ ID NO: 118179 - DNA, 26 bp, Homo sapiens
agttatgagttgattttttttttttt

SEQ ID NO: 118180 - DNA, 26 bp, Homo sapiens
gttatgagttgatttttttttttttt

SEQ ID NO: 118181 - DNA, 26 bp, Homo sapiens
ttatgagttgattttttttttttttt

SEQ ID NO: 118182 - DNA, 26 bp, Homo sapiens
tatgagttgatttttttttttttttt

SEQ ID NO: 118183 - DNA, 26 bp, Homo sapiens
atgagttgattttttttttttttttt

SEQ ID NO: 118184 - DNA, 26 bp, Homo sapiens
tgagttgatttttttttttttttttt

SEQ ID NO: 118185 - DNA, 26 bp, Homo sapiens
gagttgattttttttttttttttttg

SEQ ID NO: 118186 - DNA, 26 bp, Homo sapiens
agttgattttttttttttttttttga

SEQ ID NO: 118187 - DNA, 26 bp, Homo sapiens
gttgattttttttttttttttttgag

SEQ ID NO: 118188 - DNA, 26 bp, Homo sapiens
ttgattttttttttttttttttgaga

SEQ ID NO: 118189 - DNA, 26 bp, Homo sapiens
tgattttttttttttttttttgagac

SEQ ID NO: 118190 - DNA, 26 bp, Homo sapiens
gattttttttttttttttttgagacg

SEQ ID NO: 118191 - DNA, 26 bp, Homo sapiens
attttttttttttttttttgagacgg

SEQ ID NO: 118192 - DNA, 26 bp, Homo sapiens
ttttttttttttttttttgagacgga

SEQ ID NO: 118193 - DNA, 26 bp, Homo sapiens
tttttttttttttttttgagacggag

SEQ ID NO: 118194 - DNA, 26 bp, Homo sapiens
ttttttttttttttttgagacggagt

SEQ ID NO: 118195 - DNA, 26 bp, Homo sapiens
tttttttttttttttgagacggagtt

SEQ ID NO: 118196 - DNA, 26 bp, Homo sapiens
ttttttttttttttgagacggagttt

SEQ ID NO: 118197 - DNA, 26 bp, Homo sapiens
tttttttttttttgagacggagtttc

SEQ ID NO: 118198 - DNA, 26 bp, Homo sapiens
ttttttttttttgagacggagtttcg

SEQ ID NO: 118199 - DNA, 26 bp, Homo sapiens
tttttttttttgagacggagtttcgc

SEQ ID NO: 118200 - DNA, 26 bp, Homo sapiens
ttttttttttgagacggagtttcgct

SEQ ID NO: 118201 - DNA, 26 bp, Homo sapiens
tttttttttgagacggagtttcgctc

SEQ ID NO: 118202 - DNA, 26 bp, Homo sapiens
ttttttttgagacggagtttcgctct

SEQ ID NO: 118203 - DNA, 26 bp, Homo sapiens
tttttttgagacggagtttcgctctg

SEQ ID NO: 118204 - DNA, 26 bp, Homo sapiens
ttttttgagacggagtttcgctctgt

SEQ ID NO: 118205 - DNA, 26 bp, Homo sapiens
tttttgagacggagtttcgctctgtc

SEQ ID NO: 118206 - DNA, 26 bp, Homo sapiens
ttttgagacggagtttcgctctgtcg

SEQ ID NO: 118207 - DNA, 26 bp, Homo sapiens
tttgagacggagtttcgctctgtcgc

SEQ ID NO: 118208 - DNA, 26 bp, Homo sapiens
ttgagacggagtttcgctctgtcgcc

SEQ ID NO: 118209 - DNA, 26 bp, Homo sapiens
tgagacggagtttcgctctgtcgccc

SEQ ID NO: 118210 - DNA, 26 bp, Homo sapiens
gagacggagtttcgctctgtcgccca

SEQ ID NO: 118211 - DNA, 26 bp, Homo sapiens
agacggagtttcgctctgtcgcccag

SEQ ID NO: 118212 - DNA, 26 bp, Homo sapiens
gacggagtttcgctctgtcgcccagg

SEQ ID NO: 118213 - DNA, 26 bp, Homo sapiens
acggagtttcgctctgtcgcccaggc

SEQ ID NO: 118214 - DNA, 26 bp, Homo sapiens
cggagtttcgctctgtcgcccaggct

SEQ ID NO: 118215 - DNA, 26 bp, Homo sapiens
ggagtttcgctctgtcgcccaggctg

SEQ ID NO: 118216 - DNA, 26 bp, Homo sapiens
gagtttcgctctgtcgcccaggctgg

SEQ ID NO: 118217 - DNA, 26 bp, Homo sapiens
agtttcgctctgtcgcccaggctgga

SEQ ID NO: 118218 - DNA, 26 bp, Homo sapiens
gtttcgctctgtcgcccaggctggag

SEQ ID NO: 118219 - DNA, 26 bp, Homo sapiens
tttcgctctgtcgcccaggctggagt

SEQ ID NO: 118220 - DNA, 26 bp, Homo sapiens
ttcgctctgtcgcccaggctggagtg

SEQ ID NO: 118221 - DNA, 26 bp, Homo sapiens
tcgctctgtcgcccaggctggagtgc

SEQ ID NO: 118222 - DNA, 26 bp, Homo sapiens
cgctctgtcgcccaggctggagtgca

SEQ ID NO: 118223 - DNA, 26 bp, Homo sapiens
gctctgtcgcccaggctggagtgcag

SEQ ID NO: 118224 - DNA, 26 bp, Homo sapiens
ctctgtcgcccaggctggagtgcagt

SEQ ID NO: 118225 - DNA, 26 bp, Homo sapiens
tctgtcgcccaggctggagtgcagtg

SEQ ID NO: 118226 - DNA, 26 bp, Homo sapiens
ctgtcgcccaggctggagtgcagtgg

SEQ ID NO: 118227 - DNA, 26 bp, Homo sapiens
tgtcgcccaggctggagtgcagtggc

SEQ ID NO: 118228 - DNA, 26 bp, Homo sapiens
gtcgcccaggctggagtgcagtggcg

SEQ ID NO: 118229 - DNA, 26 bp, Homo sapiens
tcgcccaggctggagtgcagtggcgc

SEQ ID NO: 118230 - DNA, 26 bp, Homo sapiens
cgcccaggctggagtgcagtggcgcg

SEQ ID NO: 118231 - DNA, 26 bp, Homo sapiens
gcccaggctggagtgcagtggcgcga

SEQ ID NO: 118232 - DNA, 26 bp, Homo sapiens
cccaggctggagtgcagtggcgcgat

SEQ ID NO: 118233 - DNA, 26 bp, Homo sapiens
ccaggctggagtgcagtggcgcgatc

SEQ ID NO: 118234 - DNA, 26 bp, Homo sapiens
caggctggagtgcagtggcgcgatct

SEQ ID NO: 118235 - DNA, 26 bp, Homo sapiens
aggctggagtgcagtggcgcgatctc

SEQ ID NO: 118236 - DNA, 26 bp, Homo sapiens
ggctggagtgcagtggcgcgatctcg

SEQ ID NO: 118237 - DNA, 26 bp, Homo sapiens
gctggagtgcagtggcgcgatctcga

SEQ ID NO: 118238 - DNA, 26 bp, Homo sapiens
ctggagtgcagtggcgcgatctcgac

SEQ ID NO: 118239 - DNA, 26 bp, Homo sapiens
tggagtgcagtggcgcgatctcgact

SEQ ID NO: 118240 - DNA, 26 bp, Homo sapiens
ggagtgcagtggcgcgatctcgactc

SEQ ID NO: 118241 - DNA, 26 bp, Homo sapiens
gagtgcagtggcgcgatctcgactca

SEQ ID NO: 118242 - DNA, 26 bp, Homo sapiens
agtgcagtggcgcgatctcgactcac

SEQ ID NO: 118243 - DNA, 26 bp, Homo sapiens
gtgcagtggcgcgatctcgactcact

SEQ ID NO: 118244 - DNA, 26 bp, Homo sapiens
tgcagtggcgcgatctcgactcactg

SEQ ID NO: 118245 - DNA, 26 bp, Homo sapiens
gcagtggcgcgatctcgactcactgc

SEQ ID NO: 118246 - DNA, 26 bp, Homo sapiens
cagtggcgcgatctcgactcactgca

SEQ ID NO: 118247 - DNA, 26 bp, Homo sapiens
agtggcgcgatctcgactcactgcaa

SEQ ID NO: 118248 - DNA, 26 bp, Homo sapiens
gtggcgcgatctcgactcactgcaag

SEQ ID NO: 118249 - DNA, 26 bp, Homo sapiens
tggcgcgatctcgactcactgcaagc

SEQ ID NO: 118250 - DNA, 26 bp, Homo sapiens
ggcgcgatctcgactcactgcaagct

SEQ ID NO: 118251 - DNA, 26 bp, Homo sapiens
gcgcgatctcgactcactgcaagctc

SEQ ID NO: 118252 - DNA, 26 bp, Homo sapiens
cgcgatctcgactcactgcaagctcc

SEQ ID NO: 118253 - DNA, 26 bp, Homo sapiens
gcgatctcgactcactgcaagctccg

SEQ ID NO: 118254 - DNA, 26 bp, Homo sapiens
cgatctcgactcactgcaagctccgc

SEQ ID NO: 118255 - DNA, 26 bp, Homo sapiens
gatctcgactcactgcaagctccgcc

SEQ ID NO: 118256 - DNA, 26 bp, Homo sapiens
atctcgactcactgcaagctccgcct

SEQ ID NO: 118257 - DNA, 26 bp, Homo sapiens
tctcgactcactgcaagctccgcctc

SEQ ID NO: 118258 - DNA, 26 bp, Homo sapiens
ctcgactcactgcaagctccgcctcc

SEQ ID NO: 118259 - DNA, 26 bp, Homo sapiens
tcgactcactgcaagctccgcctcct

SEQ ID NO: 118260 - DNA, 26 bp, Homo sapiens
cgactcactgcaagctccgcctcctg

SEQ ID NO: 118261 - DNA, 26 bp, Homo sapiens
gactcactgcaagctccgcctcctgg

SEQ ID NO: 118262 - DNA, 26 bp, Homo sapiens
actcactgcaagctccgcctcctggg

SEQ ID NO: 118263 - DNA, 26 bp, Homo sapiens
ctcactgcaagctccgcctcctgggt

SEQ ID NO: 118264 - DNA, 26 bp, Homo sapiens
tcactgcaagctccgcctcctgggtt

SEQ ID NO: 118265 - DNA, 26 bp, Homo sapiens
cactgcaagctccgcctcctgggttc

SEQ ID NO: 118266 - DNA, 26 bp, Homo sapiens
actgcaagctccgcctcctgggttca

SEQ ID NO: 118267 - DNA, 26 bp, Homo sapiens
ctgcaagctccgcctcctgggttcac

SEQ ID NO: 118268 - DNA, 26 bp, Homo sapiens
tgcaagctccgcctcctgggttcacg

SEQ ID NO: 118269 - DNA, 26 bp, Homo sapiens
gcaagctccgcctcctgggttcacgc

SEQ ID NO: 118270 - DNA, 26 bp, Homo sapiens
caagctccgcctcctgggttcacgcc

SEQ ID NO: 118271 - DNA, 26 bp, Homo sapiens
aagctccgcctcctgggttcacgcca

SEQ ID NO: 118272 - DNA, 26 bp, Homo sapiens
agctccgcctcctgggttcacgccat

SEQ ID NO: 118273 - DNA, 26 bp, Homo sapiens
gctccgcctcctgggttcacgccatt

SEQ ID NO: 118274 - DNA, 26 bp, Homo sapiens
ctccgcctcctgggttcacgccattc

SEQ ID NO: 118275 - DNA, 26 bp, Homo sapiens
tccgcctcctgggttcacgccattct

SEQ ID NO: 118276 - DNA, 26 bp, Homo sapiens
ccgcctcctgggttcacgccattctc

SEQ ID NO: 118277 - DNA, 26 bp, Homo sapiens
cgcctcctgggttcacgccattctcc

SEQ ID NO: 118278 - DNA, 26 bp, Homo sapiens
gcctcctgggttcacgccattctcct

SEQ ID NO: 118279 - DNA, 26 bp, Homo sapiens
cctcctgggttcacgccattctcctg

SEQ ID NO: 118280 - DNA, 26 bp, Homo sapiens
ctcctgggttcacgccattctcctgc

SEQ ID NO: 118281 - DNA, 26 bp, Homo sapiens
tcctgggttcacgccattctcctgcc

SEQ ID NO: 118282 - DNA, 26 bp, Homo sapiens
cctgggttcacgccattctcctgcct

SEQ ID NO: 118283 - DNA, 26 bp, Homo sapiens
ctgggttcacgccattctcctgcctc

SEQ ID NO: 118284 - DNA, 26 bp, Homo sapiens
tgggttcacgccattctcctgcctca

SEQ ID NO: 118285 - DNA, 26 bp, Homo sapiens
gggttcacgccattctcctgcctcag

SEQ ID NO: 118286 - DNA, 26 bp, Homo sapiens
ggttcacgccattctcctgcctcagc

SEQ ID NO: 118287 - DNA, 26 bp, Homo sapiens
gttcacgccattctcctgcctcagcc

SEQ ID NO: 118288 - DNA, 26 bp, Homo sapiens
ttcacgccattctcctgcctcagcct

SEQ ID NO: 118289 - DNA, 26 bp, Homo sapiens
tcacgccattctcctgcctcagcctc

SEQ ID NO: 118290 - DNA, 26 bp, Homo sapiens
cacgccattctcctgcctcagcctcc

SEQ ID NO: 118291 - DNA, 26 bp, Homo sapiens
acgccattctcctgcctcagcctccc

SEQ ID NO: 118292 - DNA, 26 bp, Homo sapiens
cgccattctcctgcctcagcctcccg

SEQ ID NO: 118293 - DNA, 26 bp, Homo sapiens
gccattctcctgcctcagcctcccgt

SEQ ID NO: 118294 - DNA, 26 bp, Homo sapiens
ccattctcctgcctcagcctcccgtg

SEQ ID NO: 118295 - DNA, 26 bp, Homo sapiens
cattctcctgcctcagcctcccgtgt

SEQ ID NO: 118296 - DNA, 26 bp, Homo sapiens
attctcctgcctcagcctcccgtgta

SEQ ID NO: 118297 - DNA, 26 bp, Homo sapiens
ttctcctgcctcagcctcccgtgtag

SEQ ID NO: 118298 - DNA, 26 bp, Homo sapiens
tctcctgcctcagcctcccgtgtagc

SEQ ID NO: 118299 - DNA, 26 bp, Homo sapiens
ctcctgcctcagcctcccgtgtagct

SEQ ID NO: 118300 - DNA, 26 bp, Homo sapiens
tcctgcctcagcctcccgtgtagctg

SEQ ID NO: 118301 - DNA, 26 bp, Homo sapiens
cctgcctcagcctcccgtgtagctgg

SEQ ID NO: 118302 - DNA, 26 bp, Homo sapiens
ctgcctcagcctcccgtgtagctggg

SEQ ID NO: 118303 - DNA, 26 bp, Homo sapiens
tgcctcagcctcccgtgtagctggga

SEQ ID NO: 118304 - DNA, 26 bp, Homo sapiens
gcctcagcctcccgtgtagctgggac

SEQ ID NO: 118305 - DNA, 26 bp, Homo sapiens
cctcagcctcccgtgtagctgggact

SEQ ID NO: 118306 - DNA, 26 bp, Homo sapiens
ctcagcctcccgtgtagctgggacta

SEQ ID NO: 118307 - DNA, 26 bp, Homo sapiens
tcagcctcccgtgtagctgggactac

SEQ ID NO: 118308 - DNA, 26 bp, Homo sapiens
cagcctcccgtgtagctgggactaca

SEQ ID NO: 118309 - DNA, 26 bp, Homo sapiens
agcctcccgtgtagctgggactacag

SEQ ID NO: 118310 - DNA, 26 bp, Homo sapiens
gcctcccgtgtagctgggactacagg

SEQ ID NO: 118311 - DNA, 26 bp, Homo sapiens
cctcccgtgtagctgggactacaggc

SEQ ID NO: 118312 - DNA, 26 bp, Homo sapiens
ctcccgtgtagctgggactacaggcg

SEQ ID NO: 118313 - DNA, 26 bp, Homo sapiens
tcccgtgtagctgggactacaggcgc

SEQ ID NO: 118314 - DNA, 26 bp, Homo sapiens
cccgtgtagctgggactacaggcgcg

SEQ ID NO: 118315 - DNA, 26 bp, Homo sapiens
ccgtgtagctgggactacaggcgcgt

SEQ ID NO: 118316 - DNA, 26 bp, Homo sapiens
cgtgtagctgggactacaggcgcgtg

SEQ ID NO: 118317 - DNA, 26 bp, Homo sapiens
gtgtagctgggactacaggcgcgtgc

SEQ ID NO: 118318 - DNA, 26 bp, Homo sapiens
tgtagctgggactacaggcgcgtgcc

SEQ ID NO: 118319 - DNA, 26 bp, Homo sapiens
gtagctgggactacaggcgcgtgcca

SEQ ID NO: 118320 - DNA, 26 bp, Homo sapiens
tagctgggactacaggcgcgtgccac

SEQ ID NO: 118321 - DNA, 26 bp, Homo sapiens
agctgggactacaggcgcgtgccacc

SEQ ID NO: 118322 - DNA, 26 bp, Homo sapiens
gctgggactacaggcgcgtgccacca

SEQ ID NO: 118323 - DNA, 26 bp, Homo sapiens
ctgggactacaggcgcgtgccaccat

SEQ ID NO: 118324 - DNA, 26 bp, Homo sapiens
tgggactacaggcgcgtgccaccatg

SEQ ID NO: 118325 - DNA, 26 bp, Homo sapiens
gggactacaggcgcgtgccaccatgc

SEQ ID NO: 118326 - DNA, 26 bp, Homo sapiens
ggactacaggcgcgtgccaccatgcc

SEQ ID NO: 118327 - DNA, 26 bp, Homo sapiens
gactacaggcgcgtgccaccatgccc

SEQ ID NO: 118328 - DNA, 26 bp, Homo sapiens
actacaggcgcgtgccaccatgcccg

SEQ ID NO: 118329 - DNA, 26 bp, Homo sapiens
ctacaggcgcgtgccaccatgcccgg

SEQ ID NO: 118330 - DNA, 26 bp, Homo sapiens
tacaggcgcgtgccaccatgcccggc

SEQ ID NO: 118331 - DNA, 26 bp, Homo sapiens
acaggcgcgtgccaccatgcccggct

SEQ ID NO: 118332 - DNA, 26 bp, Homo sapiens
caggcgcgtgccaccatgcccggcta

SEQ ID NO: 118333 - DNA, 26 bp, Homo sapiens
aggcgcgtgccaccatgcccggctaa

SEQ ID NO: 118334 - DNA, 26 bp, Homo sapiens
ggcgcgtgccaccatgcccggctaat

SEQ ID NO: 118335 - DNA, 26 bp, Homo sapiens
gcgcgtgccaccatgcccggctaatt

SEQ ID NO: 118336 - DNA, 26 bp, Homo sapiens
cgcgtgccaccatgcccggctaattt

SEQ ID NO: 118337 - DNA, 26 bp, Homo sapiens
gcgtgccaccatgcccggctaatttt

SEQ ID NO: 118338 - DNA, 26 bp, Homo sapiens
cgtgccaccatgcccggctaattttt

SEQ ID NO: 118339 - DNA, 26 bp, Homo sapiens
gtgccaccatgcccggctaatttttg

SEQ ID NO: 118340 - DNA, 26 bp, Homo sapiens
tgccaccatgcccggctaatttttgt

SEQ ID NO: 118341 - DNA, 26 bp, Homo sapiens
gccaccatgcccggctaatttttgta

SEQ ID NO: 118342 - DNA, 26 bp, Homo sapiens
ccaccatgcccggctaatttttgtat

SEQ ID NO: 118343 - DNA, 26 bp, Homo sapiens
caccatgcccggctaatttttgtatt

SEQ ID NO: 118344 - DNA, 26 bp, Homo sapiens
accatgcccggctaatttttgtattt

SEQ ID NO: 118345 - DNA, 26 bp, Homo sapiens
ccatgcccggctaatttttgtatttt

SEQ ID NO: 118346 - DNA, 26 bp, Homo sapiens
catgcccggctaatttttgtattttt

SEQ ID NO: 118347 - DNA, 26 bp, Homo sapiens
atgcccggctaatttttgtattttta

SEQ ID NO: 118348 - DNA, 26 bp, Homo sapiens
tgcccggctaatttttgtatttttag

SEQ ID NO: 118349 - DNA, 26 bp, Homo sapiens
gcccggctaatttttgtatttttagt

SEQ ID NO: 118350 - DNA, 26 bp, Homo sapiens
cccggctaatttttgtatttttagta

SEQ ID NO: 118351 - DNA, 26 bp, Homo sapiens
ccggctaatttttgtatttttagtag

SEQ ID NO: 118352 - DNA, 26 bp, Homo sapiens
cggctaatttttgtatttttagtaga

SEQ ID NO: 118353 - DNA, 26 bp, Homo sapiens
ggctaatttttgtatttttagtagag

SEQ ID NO: 118354 - DNA, 26 bp, Homo sapiens
gctaatttttgtatttttagtagaga

SEQ ID NO: 118355 - DNA, 26 bp, Homo sapiens
ctaatttttgtatttttagtagagac

SEQ ID NO: 118356 - DNA, 26 bp, Homo sapiens
taatttttgtatttttagtagagacg

SEQ ID NO: 118357 - DNA, 26 bp, Homo sapiens
aatttttgtatttttagtagagacgg

SEQ ID NO: 118358 - DNA, 26 bp, Homo sapiens
atttttgtatttttagtagagacggg

SEQ ID NO: 118359 - DNA, 26 bp, Homo sapiens
tttttgtatttttagtagagacgggg

SEQ ID NO: 118360 - DNA, 26 bp, Homo sapiens
ttttgtatttttagtagagacggggt

SEQ ID NO: 118361 - DNA, 26 bp, Homo sapiens
tttgtatttttagtagagacggggtt

SEQ ID NO: 118362 - DNA, 26 bp, Homo sapiens
ttgtatttttagtagagacggggttt

SEQ ID NO: 118363 - DNA, 26 bp, Homo sapiens
tgtatttttagtagagacggggtttc

SEQ ID NO: 118364 - DNA, 26 bp, Homo sapiens
gtatttttagtagagacggggtttca

SEQ ID NO: 118365 - DNA, 26 bp, Homo sapiens
tatttttagtagagacggggtttcac

SEQ ID NO: 118366 - DNA, 26 bp, Homo sapiens
atttttagtagagacggggtttcacc

SEQ ID NO: 118367 - DNA, 26 bp, Homo sapiens
tttttagtagagacggggtttcaccg

SEQ ID NO: 118368 - DNA, 26 bp, Homo sapiens
ttttagtagagacggggtttcaccgt

SEQ ID NO: 118369 - DNA, 26 bp, Homo sapiens
tttagtagagacggggtttcaccgtg

SEQ ID NO: 118370 - DNA, 26 bp, Homo sapiens
ttagtagagacggggtttcaccgtgt

SEQ ID NO: 118371 - DNA, 26 bp, Homo sapiens
tagtagagacggggtttcaccgtgtt

SEQ ID NO: 118372 - DNA, 26 bp, Homo sapiens
agtagagacggggtttcaccgtgtta

SEQ ID NO: 118373 - DNA, 26 bp, Homo sapiens
gtagagacggggtttcaccgtgttag

SEQ ID NO: 118374 - DNA, 26 bp, Homo sapiens
tagagacggggtttcaccgtgttagc

SEQ ID NO: 118375 - DNA, 26 bp, Homo sapiens
agagacggggtttcaccgtgttagcc

SEQ ID NO: 118376 - DNA, 26 bp, Homo sapiens
gagacggggtttcaccgtgttagcca

SEQ ID NO: 118377 - DNA, 26 bp, Homo sapiens
agacggggtttcaccgtgttagccag

SEQ ID NO: 118378 - DNA, 26 bp, Homo sapiens
gacggggtttcaccgtgttagccagg

SEQ ID NO: 118379 - DNA, 26 bp, Homo sapiens
acggggtttcaccgtgttagccagga

SEQ ID NO: 118380 - DNA, 26 bp, Homo sapiens
cggggtttcaccgtgttagccaggat

SEQ ID NO: 118381 - DNA, 26 bp, Homo sapiens
ggggtttcaccgtgttagccaggatg

SEQ ID NO: 118382 - DNA, 26 bp, Homo sapiens
gggtttcaccgtgttagccaggatgg

SEQ ID NO: 118383 - DNA, 26 bp, Homo sapiens
ggtttcaccgtgttagccaggatggt

SEQ ID NO: 118384 - DNA, 26 bp, Homo sapiens
gtttcaccgtgttagccaggatggtc

SEQ ID NO: 118385 - DNA, 26 bp, Homo sapiens
tttcaccgtgttagccaggatggtct

SEQ ID NO: 118386 - DNA, 26 bp, Homo sapiens
ttcaccgtgttagccaggatggtctc

SEQ ID NO: 118387 - DNA, 26 bp, Homo sapiens
tcaccgtgttagccaggatggtctcg

SEQ ID NO: 118388 - DNA, 26 bp, Homo sapiens
caccgtgttagccaggatggtctcga

SEQ ID NO: 118389 - DNA, 26 bp, Homo sapiens
accgtgttagccaggatggtctcgat

SEQ ID NO: 118390 - DNA, 26 bp, Homo sapiens
ccgtgttagccaggatggtctcgatc

SEQ ID NO: 118391 - DNA, 26 bp, Homo sapiens
cgtgttagccaggatggtctcgatct

SEQ ID NO: 118392 - DNA, 26 bp, Homo sapiens
gtgttagccaggatggtctcgatctc

SEQ ID NO: 118393 - DNA, 26 bp, Homo sapiens
tgttagccaggatggtctcgatctcc

SEQ ID NO: 118394 - DNA, 26 bp, Homo sapiens
gttagccaggatggtctcgatctcct

SEQ ID NO: 118395 - DNA, 26 bp, Homo sapiens
ttagccaggatggtctcgatctcctg

SEQ ID NO: 118396 - DNA, 26 bp, Homo sapiens
tagccaggatggtctcgatctcctga

SEQ ID NO: 118397 - DNA, 26 bp, Homo sapiens
agccaggatggtctcgatctcctgac

SEQ ID NO: 118398 - DNA, 26 bp, Homo sapiens
gccaggatggtctcgatctcctgacc

SEQ ID NO: 118399 - DNA, 26 bp, Homo sapiens
ccaggatggtctcgatctcctgacct

SEQ ID NO: 118400 - DNA, 26 bp, Homo sapiens
caggatggtctcgatctcctgacctc

SEQ ID NO: 118401 - DNA, 26 bp, Homo sapiens
aggatggtctcgatctcctgacctcg

SEQ ID NO: 118402 - DNA, 26 bp, Homo sapiens
ggatggtctcgatctcctgacctcgt

SEQ ID NO: 118403 - DNA, 26 bp, Homo sapiens
gatggtctcgatctcctgacctcgtg

SEQ ID NO: 118404 - DNA, 26 bp, Homo sapiens
atggtctcgatctcctgacctcgtga

SEQ ID NO: 118405 - DNA, 26 bp, Homo sapiens
tggtctcgatctcctgacctcgtgat

SEQ ID NO: 118406 - DNA, 26 bp, Homo sapiens
ggtctcgatctcctgacctcgtgatc

SEQ ID NO: 118407 - DNA, 26 bp, Homo sapiens
gtctcgatctcctgacctcgtgatcc

SEQ ID NO: 118408 - DNA, 26 bp, Homo sapiens
tctcgatctcctgacctcgtgatcca

SEQ ID NO: 118409 - DNA, 26 bp, Homo sapiens
ctcgatctcctgacctcgtgatccac

SEQ ID NO: 118410 - DNA, 26 bp, Homo sapiens
tcgatctcctgacctcgtgatccacc

SEQ ID NO: 118411 - DNA, 26 bp, Homo sapiens
cgatctcctgacctcgtgatccaccc

SEQ ID NO: 118412 - DNA, 26 bp, Homo sapiens
gatctcctgacctcgtgatccacccg

SEQ ID NO: 118413 - DNA, 26 bp, Homo sapiens
atctcctgacctcgtgatccacccgt

SEQ ID NO: 118414 - DNA, 26 bp, Homo sapiens
tctcctgacctcgtgatccacccgtc

SEQ ID NO: 118415 - DNA, 26 bp, Homo sapiens
ctcctgacctcgtgatccacccgtct

SEQ ID NO: 118416 - DNA, 26 bp, Homo sapiens
tcctgacctcgtgatccacccgtctc

SEQ ID NO: 118417 - DNA, 26 bp, Homo sapiens
cctgacctcgtgatccacccgtctcg

SEQ ID NO: 118418 - DNA, 26 bp, Homo sapiens
ctgacctcgtgatccacccgtctcgg

SEQ ID NO: 118419 - DNA, 26 bp, Homo sapiens
tgacctcgtgatccacccgtctcggc

SEQ ID NO: 118420 - DNA, 26 bp, Homo sapiens
gacctcgtgatccacccgtctcggcc

SEQ ID NO: 118421 - DNA, 26 bp, Homo sapiens
acctcgtgatccacccgtctcggcct

SEQ ID NO: 118422 - DNA, 26 bp, Homo sapiens
cctcgtgatccacccgtctcggcctc

SEQ ID NO: 118423 - DNA, 26 bp, Homo sapiens
ctcgtgatccacccgtctcggcctcc

SEQ ID NO: 118424 - DNA, 26 bp, Homo sapiens
tcgtgatccacccgtctcggcctccc

SEQ ID NO: 118425 - DNA, 26 bp, Homo sapiens
cgtgatccacccgtctcggcctccca

SEQ ID NO: 118426 - DNA, 26 bp, Homo sapiens
gtgatccacccgtctcggcctcccaa

SEQ ID NO: 118427 - DNA, 26 bp, Homo sapiens
tgatccacccgtctcggcctcccaaa

SEQ ID NO: 118428 - DNA, 26 bp, Homo sapiens
gatccacccgtctcggcctcccaaag

SEQ ID NO: 118429 - DNA, 26 bp, Homo sapiens
atccacccgtctcggcctcccaaagt

SEQ ID NO: 118430 - DNA, 26 bp, Homo sapiens
tccacccgtctcggcctcccaaagtg

SEQ ID NO: 118431 - DNA, 26 bp, Homo sapiens
ccacccgtctcggcctcccaaagtgc

SEQ ID NO: 118432 - DNA, 26 bp, Homo sapiens
cacccgtctcggcctcccaaagtgct

SEQ ID NO: 118433 - DNA, 26 bp, Homo sapiens
acccgtctcggcctcccaaagtgctg

SEQ ID NO: 118434 - DNA, 26 bp, Homo sapiens
cccgtctcggcctcccaaagtgctgg

SEQ ID NO: 118435 - DNA, 26 bp, Homo sapiens
ccgtctcggcctcccaaagtgctggg

SEQ ID NO: 118436 - DNA, 26 bp, Homo sapiens
cgtctcggcctcccaaagtgctggga

SEQ ID NO: 118437 - DNA, 26 bp, Homo sapiens
gtctcggcctcccaaagtgctgggat

SEQ ID NO: 118438 - DNA, 26 bp, Homo sapiens
tctcggcctcccaaagtgctgggatt

SEQ ID NO: 118439 - DNA, 26 bp, Homo sapiens
ctcggcctcccaaagtgctgggatta

SEQ ID NO: 118440 - DNA, 26 bp, Homo sapiens
tcggcctcccaaagtgctgggattac

SEQ ID NO: 118441 - DNA, 26 bp, Homo sapiens
cggcctcccaaagtgctgggattaca

SEQ ID NO: 118442 - DNA, 26 bp, Homo sapiens
ggcctcccaaagtgctgggattacag

SEQ ID NO: 118443 - DNA, 26 bp, Homo sapiens
gcctcccaaagtgctgggattacagg

SEQ ID NO: 118444 - DNA, 26 bp, Homo sapiens
cctcccaaagtgctgggattacaggc

SEQ ID NO: 118445 - DNA, 26 bp, Homo sapiens
ctcccaaagtgctgggattacaggca

SEQ ID NO: 118446 - DNA, 26 bp, Homo sapiens
tcccaaagtgctgggattacaggcaa

SEQ ID NO: 118447 - DNA, 26 bp, Homo sapiens
cccaaagtgctgggattacaggcaat

SEQ ID NO: 118448 - DNA, 26 bp, Homo sapiens
ccaaagtgctgggattacaggcaatg

SEQ ID NO: 118449 - DNA, 26 bp, Homo sapiens
caaagtgctgggattacaggcaatga

SEQ ID NO: 118450 - DNA, 26 bp, Homo sapiens
aaagtgctgggattacaggcaatgag

SEQ ID NO: 118451 - DNA, 26 bp, Homo sapiens
aagtgctgggattacaggcaatgagt

SEQ ID NO: 118452 - DNA, 26 bp, Homo sapiens
agtgctgggattacaggcaatgagtt

SEQ ID NO: 118453 - DNA, 26 bp, Homo sapiens
gtgctgggattacaggcaatgagttg

SEQ ID NO: 118454 - DNA, 26 bp, Homo sapiens
tgctgggattacaggcaatgagttga

SEQ ID NO: 118455 - DNA, 26 bp, Homo sapiens
gctgggattacaggcaatgagttgat

SEQ ID NO: 118456 - DNA, 26 bp, Homo sapiens
ctgggattacaggcaatgagttgatt

SEQ ID NO: 118457 - DNA, 26 bp, Homo sapiens
tgggattacaggcaatgagttgattt

SEQ ID NO: 118458 - DNA, 26 bp, Homo sapiens
gggattacaggcaatgagttgatttt

SEQ ID NO: 118459 - DNA, 26 bp, Homo sapiens
ggattacaggcaatgagttgattttt

SEQ ID NO: 118460 - DNA, 26 bp, Homo sapiens
gattacaggcaatgagttgattttta

SEQ ID NO: 118461 - DNA, 26 bp, Homo sapiens
attacaggcaatgagttgatttttaa

SEQ ID NO: 118462 - DNA, 26 bp, Homo sapiens
ttacaggcaatgagttgatttttaac

SEQ ID NO: 118463 - DNA, 26 bp, Homo sapiens
tacaggcaatgagttgatttttaact

SEQ ID NO: 118464 - DNA, 26 bp, Homo sapiens
acaggcaatgagttgatttttaacta

SEQ ID NO: 118465 - DNA, 26 bp, Homo sapiens
caggcaatgagttgatttttaactac

SEQ ID NO: 118466 - DNA, 26 bp, Homo sapiens
aggcaatgagttgatttttaactact

SEQ ID NO: 118467 - DNA, 26 bp, Homo sapiens
ggcaatgagttgatttttaactactg

SEQ ID NO: 118468 - DNA, 26 bp, Homo sapiens
gcaatgagttgatttttaactactgg

SEQ ID NO: 118469 - DNA, 26 bp, Homo sapiens
caatgagttgatttttaactactggg

SEQ ID NO: 118470 - DNA, 26 bp, Homo sapiens
aatgagttgatttttaactactgggt

SEQ ID NO: 118471 - DNA, 26 bp, Homo sapiens
atgagttgatttttaactactgggtt

SEQ ID NO: 118472 - DNA, 26 bp, Homo sapiens
tgagttgatttttaactactgggttt

SEQ ID NO: 118473 - DNA, 26 bp, Homo sapiens
gagttgatttttaactactgggttta

SEQ ID NO: 118474 - DNA, 26 bp, Homo sapiens
agttgatttttaactactgggtttag

SEQ ID NO: 118475 - DNA, 26 bp, Homo sapiens
gttgatttttaactactgggtttagg

SEQ ID NO: 118476 - DNA, 26 bp, Homo sapiens
ttgatttttaactactgggtttaggc

SEQ ID NO: 118477 - DNA, 26 bp, Homo sapiens
tgatttttaactactgggtttaggcc

SEQ ID NO: 118478 - DNA, 26 bp, Homo sapiens
gatttttaactactgggtttaggcca

SEQ ID NO: 118479 - DNA, 26 bp, Homo sapiens
atttttaactactgggtttaggccag

SEQ ID NO: 118480 - DNA, 26 bp, Homo sapiens
tttttaactactgggtttaggccagg

SEQ ID NO: 118481 - DNA, 26 bp, Homo sapiens
ttttaactactgggtttaggccaggc

SEQ ID NO: 118482 - DNA, 26 bp, Homo sapiens
tttaactactgggtttaggccaggca

SEQ ID NO: 118483 - DNA, 26 bp, Homo sapiens
ttaactactgggtttaggccaggcag

SEQ ID NO: 118484 - DNA, 26 bp, Homo sapiens
taactactgggtttaggccaggcagg

SEQ ID NO: 118485 - DNA, 26 bp, Homo sapiens
aactactgggtttaggccaggcaggc

SEQ ID NO: 118486 - DNA, 26 bp, Homo sapiens
actactgggtttaggccaggcaggcc

SEQ ID NO: 118487 - DNA, 26 bp, Homo sapiens
ctactgggtttaggccaggcaggccc

SEQ ID NO: 118488 - DNA, 26 bp, Homo sapiens
tactgggtttaggccaggcaggccca

SEQ ID NO: 118489 - DNA, 26 bp, Homo sapiens
actgggtttaggccaggcaggcccag

SEQ ID NO: 118490 - DNA, 26 bp, Homo sapiens
ctgggtttaggccaggcaggcccagg

SEQ ID NO: 118491 - DNA, 26 bp, Homo sapiens
tgggtttaggccaggcaggcccaggc

SEQ ID NO: 118492 - DNA, 26 bp, Homo sapiens
gggtttaggccaggcaggcccaggcc

SEQ ID NO: 118493 - DNA, 26 bp, Homo sapiens
ggtttaggccaggcaggcccaggcct

SEQ ID NO: 118494 - DNA, 26 bp, Homo sapiens
gtttaggccaggcaggcccaggcctg

SEQ ID NO: 118495 - DNA, 26 bp, Homo sapiens
tttaggccaggcaggcccaggcctgg

SEQ ID NO: 118496 - DNA, 26 bp, Homo sapiens
ttaggccaggcaggcccaggcctggt

SEQ ID NO: 118497 - DNA, 26 bp, Homo sapiens
taggccaggcaggcccaggcctggtt

SEQ ID NO: 118498 - DNA, 26 bp, Homo sapiens
aggccaggcaggcccaggcctggttt

SEQ ID NO: 118499 - DNA, 26 bp, Homo sapiens
ggccaggcaggcccaggcctggtttt

SEQ ID NO: 118500 - DNA, 26 bp, Homo sapiens
gccaggcaggcccaggcctggttttg

SEQ ID NO: 118501 - DNA, 26 bp, Homo sapiens
ccaggcaggcccaggcctggttttgg

SEQ ID NO: 118502 - DNA, 26 bp, Homo sapiens
caggcaggcccaggcctggttttggg

SEQ ID NO: 118503 - DNA, 26 bp, Homo sapiens
aggcaggcccaggcctggttttgggc

SEQ ID NO: 118504 - DNA, 26 bp, Homo sapiens
ggcaggcccaggcctggttttgggcc

SEQ ID NO: 118505 - DNA, 26 bp, Homo sapiens
gcaggcccaggcctggttttgggcct

SEQ ID NO: 118506 - DNA, 26 bp, Homo sapiens
caggcccaggcctggttttgggcctg

SEQ ID NO: 118507 - DNA, 26 bp, Homo sapiens
aggcccaggcctggttttgggcctgg

SEQ ID NO: 118508 - DNA, 26 bp, Homo sapiens
ggcccaggcctggttttgggcctggc

SEQ ID NO: 118509 - DNA, 26 bp, Homo sapiens
gcccaggcctggttttgggcctggcg

SEQ ID NO: 118510 - DNA, 26 bp, Homo sapiens
cccaggcctggttttgggcctggcgc

SEQ ID NO: 118511 - DNA, 26 bp, Homo sapiens
ccaggcctggttttgggcctggcgct

SEQ ID NO: 118512 - DNA, 26 bp, Homo sapiens
caggcctggttttgggcctggcgctg

SEQ ID NO: 118513 - DNA, 26 bp, Homo sapiens
aggcctggttttgggcctggcgctgg

SEQ ID NO: 118514 - DNA, 26 bp, Homo sapiens
ggcctggttttgggcctggcgctggg

SEQ ID NO: 118515 - DNA, 26 bp, Homo sapiens
gcctggttttgggcctggcgctgggc

SEQ ID NO: 118516 - DNA, 26 bp, Homo sapiens
cctggttttgggcctggcgctgggct

SEQ ID NO: 118517 - DNA, 26 bp, Homo sapiens
ctggttttgggcctggcgctgggctg

SEQ ID NO: 118518 - DNA, 26 bp, Homo sapiens
tggttttgggcctggcgctgggctgc

SEQ ID NO: 118519 - DNA, 26 bp, Homo sapiens
ggttttgggcctggcgctgggctgcc

SEQ ID NO: 118520 - DNA, 26 bp, Homo sapiens
gttttgggcctggcgctgggctgcct

SEQ ID NO: 118521 - DNA, 26 bp, Homo sapiens
ttttgggcctggcgctgggctgcctg

SEQ ID NO: 118522 - DNA, 26 bp, Homo sapiens
tttgggcctggcgctgggctgcctgt

SEQ ID NO: 118523 - DNA, 26 bp, Homo sapiens
ttgggcctggcgctgggctgcctgtc

SEQ ID NO: 118524 - DNA, 26 bp, Homo sapiens
tgggcctggcgctgggctgcctgtct

SEQ ID NO: 118525 - DNA, 26 bp, Homo sapiens
gggcctggcgctgggctgcctgtctt

SEQ ID NO: 118526 - DNA, 26 bp, Homo sapiens
ggcctggcgctgggctgcctgtcttt

SEQ ID NO: 118527 - DNA, 26 bp, Homo sapiens
gcctggcgctgggctgcctgtctttg

SEQ ID NO: 118528 - DNA, 26 bp, Homo sapiens
cctggcgctgggctgcctgtctttgg

SEQ ID NO: 118529 - DNA, 26 bp, Homo sapiens
ctggcgctgggctgcctgtctttggt

SEQ ID NO: 118530 - DNA, 26 bp, Homo sapiens
tggcgctgggctgcctgtctttggtt

SEQ ID NO: 118531 - DNA, 26 bp, Homo sapiens
ggcgctgggctgcctgtctttggttt

SEQ ID NO: 118532 - DNA, 26 bp, Homo sapiens
gcgctgggctgcctgtctttggtttt

SEQ ID NO: 118533 - DNA, 26 bp, Homo sapiens
cgctgggctgcctgtctttggtttta

SEQ ID NO: 118534 - DNA, 26 bp, Homo sapiens
gctgggctgcctgtctttggttttac

SEQ ID NO: 118535 - DNA, 26 bp, Homo sapiens
ctgggctgcctgtctttggttttact

SEQ ID NO: 118536 - DNA, 26 bp, Homo sapiens
tgggctgcctgtctttggttttactt

SEQ ID NO: 118537 - DNA, 26 bp, Homo sapiens
gggctgcctgtctttggttttacttc

SEQ ID NO: 118538 - DNA, 26 bp, Homo sapiens
ggctgcctgtctttggttttacttcc

SEQ ID NO: 118539 - DNA, 26 bp, Homo sapiens
gctgcctgtctttggttttacttcct

SEQ ID NO: 118540 - DNA, 26 bp, Homo sapiens
ctgcctgtctttggttttacttcctt

SEQ ID NO: 118541 - DNA, 26 bp, Homo sapiens
tgcctgtctttggttttacttccttg

SEQ ID NO: 118542 - DNA, 26 bp, Homo sapiens
gcctgtctttggttttacttccttgt

SEQ ID NO: 118543 - DNA, 26 bp, Homo sapiens
cctgtctttggttttacttccttgtt

SEQ ID NO: 118544 - DNA, 26 bp, Homo sapiens
ctgtctttggttttacttccttgttg

SEQ ID NO: 118545 - DNA, 26 bp, Homo sapiens
tgtctttggttttacttccttgttgt

SEQ ID NO: 118546 - DNA, 26 bp, Homo sapiens
gtctttggttttacttccttgttgtt

SEQ ID NO: 118547 - DNA, 26 bp, Homo sapiens
tctttggttttacttccttgttgttt

SEQ ID NO: 118548 - DNA, 26 bp, Homo sapiens
ctttggttttacttccttgttgtttt

SEQ ID NO: 118549 - DNA, 26 bp, Homo sapiens
tttggttttacttccttgttgttttt

SEQ ID NO: 118550 - DNA, 26 bp, Homo sapiens
ttggttttacttccttgttgtttttt

SEQ ID NO: 118551 - DNA, 26 bp, Homo sapiens
tggttttacttccttgttgttttttc

SEQ ID NO: 118552 - DNA, 26 bp, Homo sapiens
ggttttacttccttgttgttttttct

SEQ ID NO: 118553 - DNA, 26 bp, Homo sapiens
gttttacttccttgttgttttttctt

SEQ ID NO: 118554 - DNA, 26 bp, Homo sapiens
ttttacttccttgttgttttttctta

SEQ ID NO: 118555 - DNA, 26 bp, Homo sapiens
tttacttccttgttgttttttcttaa

SEQ ID NO: 118556 - DNA, 26 bp, Homo sapiens
ttacttccttgttgttttttcttaaa

SEQ ID NO: 118557 - DNA, 26 bp, Homo sapiens
tacttccttgttgttttttcttaaaa

SEQ ID NO: 118558 - DNA, 26 bp, Homo sapiens
acttccttgttgttttttcttaaaac

SEQ ID NO: 118559 - DNA, 26 bp, Homo sapiens
cttccttgttgttttttcttaaaaca

SEQ ID NO: 118560 - DNA, 26 bp, Homo sapiens
ttccttgttgttttttcttaaaacag

SEQ ID NO: 118561 - DNA, 26 bp, Homo sapiens
tccttgttgttttttcttaaaacagg

SEQ ID NO: 118562 - DNA, 26 bp, Homo sapiens
ccttgttgttttttcttaaaacaggt

SEQ ID NO: 118563 - DNA, 26 bp, Homo sapiens
cttgttgttttttcttaaaacaggta

SEQ ID NO: 118564 - DNA, 26 bp, Homo sapiens
ttgttgttttttcttaaaacaggtac

SEQ ID NO: 118565 - DNA, 26 bp, Homo sapiens
tgttgttttttcttaaaacaggtact

SEQ ID NO: 118566 - DNA, 26 bp, Homo sapiens
gttgttttttcttaaaacaggtactg

SEQ ID NO: 118567 - DNA, 26 bp, Homo sapiens
ttgttttttcttaaaacaggtactga

SEQ ID NO: 118568 - DNA, 26 bp, Homo sapiens
tgttttttcttaaaacaggtactgag

SEQ ID NO: 118569 - DNA, 26 bp, Homo sapiens
gttttttcttaaaacaggtactgagt

SEQ ID NO: 118570 - DNA, 26 bp, Homo sapiens
ttttttcttaaaacaggtactgagta

SEQ ID NO: 118571 - DNA, 26 bp, Homo sapiens
tttttcttaaaacaggtactgagtat

SEQ ID NO: 118572 - DNA, 26 bp, Homo sapiens
ttttcttaaaacaggtactgagtatc

SEQ ID NO: 118573 - DNA, 26 bp, Homo sapiens
tttcttaaaacaggtactgagtatca

SEQ ID NO: 118574 - DNA, 26 bp, Homo sapiens
ttcttaaaacaggtactgagtatcaa

SEQ ID NO: 118575 - DNA, 26 bp, Homo sapiens
tcttaaaacaggtactgagtatcaaa

SEQ ID NO: 118576 - DNA, 26 bp, Homo sapiens
cttaaaacaggtactgagtatcaaac

SEQ ID NO: 118577 - DNA, 26 bp, Homo sapiens
ttaaaacaggtactgagtatcaaaca

SEQ ID NO: 118578 - DNA, 26 bp, Homo sapiens
taaaacaggtactgagtatcaaacaa

SEQ ID NO: 118579 - DNA, 26 bp, Homo sapiens
aaaacaggtactgagtatcaaacaat

SEQ ID NO: 118580 - DNA, 26 bp, Homo sapiens
aaacaggtactgagtatcaaacaata

SEQ ID NO: 118581 - DNA, 26 bp, Homo sapiens
aacaggtactgagtatcaaacaatat

SEQ ID NO: 118582 - DNA, 26 bp, Homo sapiens
acaggtactgagtatcaaacaatata

SEQ ID NO: 118583 - DNA, 26 bp, Homo sapiens
caggtactgagtatcaaacaatataa

SEQ ID NO: 118584 - DNA, 26 bp, Homo sapiens
aggtactgagtatcaaacaatataaa

SEQ ID NO: 118585 - DNA, 26 bp, Homo sapiens
ggtactgagtatcaaacaatataaaa

SEQ ID NO: 118586 - DNA, 26 bp, Homo sapiens
gtactgagtatcaaacaatataaaac

SEQ ID NO: 118587 - DNA, 26 bp, Homo sapiens
tactgagtatcaaacaatataaaaca

SEQ ID NO: 118588 - DNA, 26 bp, Homo sapiens
actgagtatcaaacaatataaaacaa

SEQ ID NO: 118589 - DNA, 26 bp, Homo sapiens
ctgagtatcaaacaatataaaacaat

SEQ ID NO: 118590 - DNA, 26 bp, Homo sapiens
tgagtatcaaacaatataaaacaata

SEQ ID NO: 118591 - DNA, 26 bp, Homo sapiens
gagtatcaaacaatataaaacaatat

SEQ ID NO: 118592 - DNA, 26 bp, Homo sapiens
agtatcaaacaatataaaacaatata

SEQ ID NO: 118593 - DNA, 26 bp, Homo sapiens
gtatcaaacaatataaaacaatataa

SEQ ID NO: 118594 - DNA, 26 bp, Homo sapiens
tatcaaacaatataaaacaatataag

SEQ ID NO: 118595 - DNA, 26 bp, Homo sapiens
atcaaacaatataaaacaatataaga

SEQ ID NO: 118596 - DNA, 26 bp, Homo sapiens
tcaaacaatataaaacaatataagaa

SEQ ID NO: 118597 - DNA, 26 bp, Homo sapiens
caaacaatataaaacaatataagaag

SEQ ID NO: 118598 - DNA, 26 bp, Homo sapiens
aaacaatataaaacaatataagaagg

SEQ ID NO: 118599 - DNA, 26 bp, Homo sapiens
aacaatataaaacaatataagaaggt

SEQ ID NO: 118600 - DNA, 26 bp, Homo sapiens
acaatataaaacaatataagaaggtc

SEQ ID NO: 118601 - DNA, 26 bp, Homo sapiens
caatataaaacaatataagaaggtct

SEQ ID NO: 118602 - DNA, 26 bp, Homo sapiens
aatataaaacaatataagaaggtctc

SEQ ID NO: 118603 - DNA, 26 bp, Homo sapiens
atataaaacaatataagaaggtctct

SEQ ID NO: 118604 - DNA, 26 bp, Homo sapiens
tataaaacaatataagaaggtctctc

SEQ ID NO: 118605 - DNA, 26 bp, Homo sapiens
ataaaacaatataagaaggtctctct

SEQ ID NO: 118606 - DNA, 26 bp, Homo sapiens
taaaacaatataagaaggtctctctc

SEQ ID NO: 118607 - DNA, 26 bp, Homo sapiens
aaaacaatataagaaggtctctctct

SEQ ID NO: 118608 - DNA, 26 bp, Homo sapiens
aaacaatataagaaggtctctctctt

SEQ ID NO: 118609 - DNA, 26 bp, Homo sapiens
aacaatataagaaggtctctctcttc

SEQ ID NO: 118610 - DNA, 26 bp, Homo sapiens
acaatataagaaggtctctctcttcc

SEQ ID NO: 118611 - DNA, 26 bp, Homo sapiens
caatataagaaggtctctctcttccc

SEQ ID NO: 118612 - DNA, 26 bp, Homo sapiens
aatataagaaggtctctctcttccct

SEQ ID NO: 118613 - DNA, 26 bp, Homo sapiens
atataagaaggtctctctcttccctc

SEQ ID NO: 118614 - DNA, 26 bp, Homo sapiens
tataagaaggtctctctcttccctca

SEQ ID NO: 118615 - DNA, 26 bp, Homo sapiens
ataagaaggtctctctcttccctcaa

SEQ ID NO: 118616 - DNA, 26 bp, Homo sapiens
taagaaggtctctctcttccctcaat

SEQ ID NO: 118617 - DNA, 26 bp, Homo sapiens
aagaaggtctctctcttccctcaatt

SEQ ID NO: 118618 - DNA, 26 bp, Homo sapiens
agaaggtctctctcttccctcaattc

SEQ ID NO: 118619 - DNA, 26 bp, Homo sapiens
gaaggtctctctcttccctcaattct

SEQ ID NO: 118620 - DNA, 26 bp, Homo sapiens
aaggtctctctcttccctcaattcta

SEQ ID NO: 118621 - DNA, 26 bp, Homo sapiens
aggtctctctcttccctcaattctag

SEQ ID NO: 118622 - DNA, 26 bp, Homo sapiens
ggtctctctcttccctcaattctagc

SEQ ID NO: 118623 - DNA, 26 bp, Homo sapiens
gtctctctcttccctcaattctagct

SEQ ID NO: 118624 - DNA, 26 bp, Homo sapiens
tctctctcttccctcaattctagctg

SEQ ID NO: 118625 - DNA, 26 bp, Homo sapiens
ctctctcttccctcaattctagctgc

SEQ ID NO: 118626 - DNA, 26 bp, Homo sapiens
tctctcttccctcaattctagctgca

SEQ ID NO: 118627 - DNA, 26 bp, Homo sapiens
ctctcttccctcaattctagctgcaa

SEQ ID NO: 118628 - DNA, 26 bp, Homo sapiens
tctcttccctcaattctagctgcaag

SEQ ID NO: 118629 - DNA, 26 bp, Homo sapiens
ctcttccctcaattctagctgcaagt

SEQ ID NO: 118630 - DNA, 26 bp, Homo sapiens
tcttccctcaattctagctgcaagtt

SEQ ID NO: 118631 - DNA, 26 bp, Homo sapiens
cttccctcaattctagctgcaagttt

SEQ ID NO: 118632 - DNA, 26 bp, Homo sapiens
ttccctcaattctagctgcaagtttt

SEQ ID NO: 118633 - DNA, 26 bp, Homo sapiens
tccctcaattctagctgcaagttttg

SEQ ID NO: 118634 - DNA, 26 bp, Homo sapiens
ccctcaattctagctgcaagttttga

SEQ ID NO: 118635 - DNA, 26 bp, Homo sapiens
cctcaattctagctgcaagttttgag

SEQ ID NO: 118636 - DNA, 26 bp, Homo sapiens
ctcaattctagctgcaagttttgagc

SEQ ID NO: 118637 - DNA, 26 bp, Homo sapiens
tcaattctagctgcaagttttgagca

SEQ ID NO: 118638 - DNA, 26 bp, Homo sapiens
caattctagctgcaagttttgagcac

SEQ ID NO: 118639 - DNA, 26 bp, Homo sapiens
aattctagctgcaagttttgagcact

SEQ ID NO: 118640 - DNA, 26 bp, Homo sapiens
attctagctgcaagttttgagcacta

SEQ ID NO: 118641 - DNA, 26 bp, Homo sapiens
ttctagctgcaagttttgagcactag

SEQ ID NO: 118642 - DNA, 26 bp, Homo sapiens
tctagctgcaagttttgagcactaga

SEQ ID NO: 118643 - DNA, 26 bp, Homo sapiens
ctagctgcaagttttgagcactagac

SEQ ID NO: 118644 - DNA, 26 bp, Homo sapiens
tagctgcaagttttgagcactagaca

SEQ ID NO: 118645 - DNA, 26 bp, Homo sapiens
agctgcaagttttgagcactagacag

SEQ ID NO: 118646 - DNA, 26 bp, Homo sapiens
gctgcaagttttgagcactagacagc

SEQ ID NO: 118647 - DNA, 26 bp, Homo sapiens
ctgcaagttttgagcactagacagca

SEQ ID NO: 118648 - DNA, 26 bp, Homo sapiens
tgcaagttttgagcactagacagcag

SEQ ID NO: 118649 - DNA, 26 bp, Homo sapiens
gcaagttttgagcactagacagcaga

SEQ ID NO: 118650 - DNA, 26 bp, Homo sapiens
caagttttgagcactagacagcagaa

SEQ ID NO: 118651 - DNA, 26 bp, Homo sapiens
aagttttgagcactagacagcagaaa

SEQ ID NO: 118652 - DNA, 26 bp, Homo sapiens
agttttgagcactagacagcagaaat

SEQ ID NO: 118653 - DNA, 26 bp, Homo sapiens
gttttgagcactagacagcagaaata

SEQ ID NO: 118654 - DNA, 26 bp, Homo sapiens
ttttgagcactagacagcagaaataa

SEQ ID NO: 118655 - DNA, 26 bp, Homo sapiens
tttgagcactagacagcagaaataaa

SEQ ID NO: 118656 - DNA, 26 bp, Homo sapiens
ttgagcactagacagcagaaataaat

SEQ ID NO: 118657 - DNA, 26 bp, Homo sapiens
tgagcactagacagcagaaataaatt

SEQ ID NO: 118658 - DNA, 26 bp, Homo sapiens
gagcactagacagcagaaataaattc

SEQ ID NO: 118659 - DNA, 26 bp, Homo sapiens
agcactagacagcagaaataaattcc

SEQ ID NO: 118660 - DNA, 26 bp, Homo sapiens
gcactagacagcagaaataaattcct

SEQ ID NO: 118661 - DNA, 26 bp, Homo sapiens
cactagacagcagaaataaattccta

SEQ ID NO: 118662 - DNA, 26 bp, Homo sapiens
actagacagcagaaataaattcctaa

SEQ ID NO: 118663 - DNA, 26 bp, Homo sapiens
ctagacagcagaaataaattcctaaa

SEQ ID NO: 118664 - DNA, 26 bp, Homo sapiens
tagacagcagaaataaattcctaaaa

SEQ ID NO: 118665 - DNA, 26 bp, Homo sapiens
agacagcagaaataaattcctaaaat

SEQ ID NO: 118666 - DNA, 26 bp, Homo sapiens
gacagcagaaataaattcctaaaatg

SEQ ID NO: 118667 - DNA, 26 bp, Homo sapiens
acagcagaaataaattcctaaaatgt

SEQ ID NO: 118668 - DNA, 26 bp, Homo sapiens
cagcagaaataaattcctaaaatgtt

SEQ ID NO: 118669 - DNA, 26 bp, Homo sapiens
agcagaaataaattcctaaaatgttg

SEQ ID NO: 118670 - DNA, 26 bp, Homo sapiens
gcagaaataaattcctaaaatgttga

SEQ ID NO: 118671 - DNA, 26 bp, Homo sapiens
cagaaataaattcctaaaatgttgag

SEQ ID NO: 118672 - DNA, 26 bp, Homo sapiens
agaaataaattcctaaaatgttgagt

SEQ ID NO: 118673 - DNA, 26 bp, Homo sapiens
gaaataaattcctaaaatgttgagtt

SEQ ID NO: 118674 - DNA, 26 bp, Homo sapiens
aaataaattcctaaaatgttgagttg

SEQ ID NO: 118675 - DNA, 26 bp, Homo sapiens
aataaattcctaaaatgttgagttga

SEQ ID NO: 118676 - DNA, 26 bp, Homo sapiens
ataaattcctaaaatgttgagttgag

SEQ ID NO: 118677 - DNA, 26 bp, Homo sapiens
taaattcctaaaatgttgagttgagc

SEQ ID NO: 118678 - DNA, 26 bp, Homo sapiens
aaattcctaaaatgttgagttgagca

SEQ ID NO: 118679 - DNA, 26 bp, Homo sapiens
aattcctaaaatgttgagttgagcaa

SEQ ID NO: 118680 - DNA, 26 bp, Homo sapiens
attcctaaaatgttgagttgagcaaa

SEQ ID NO: 118681 - DNA, 26 bp, Homo sapiens
ttcctaaaatgttgagttgagcaaat

SEQ ID NO: 118682 - DNA, 26 bp, Homo sapiens
tcctaaaatgttgagttgagcaaata

SEQ ID NO: 118683 - DNA, 26 bp, Homo sapiens
cctaaaatgttgagttgagcaaatag

SEQ ID NO: 118684 - DNA, 26 bp, Homo sapiens
ctaaaatgttgagttgagcaaatagt

SEQ ID NO: 118685 - DNA, 26 bp, Homo sapiens
taaaatgttgagttgagcaaatagtt

SEQ ID NO: 118686 - DNA, 26 bp, Homo sapiens
aaaatgttgagttgagcaaatagttc

SEQ ID NO: 118687 - DNA, 26 bp, Homo sapiens
aaatgttgagttgagcaaatagttca

SEQ ID NO: 118688 - DNA, 26 bp, Homo sapiens
aatgttgagttgagcaaatagttcaa

SEQ ID NO: 118689 - DNA, 26 bp, Homo sapiens
atgttgagttgagcaaatagttcaat

SEQ ID NO: 118690 - DNA, 26 bp, Homo sapiens
tgttgagttgagcaaatagttcaatg

SEQ ID NO: 118691 - DNA, 26 bp, Homo sapiens
gttgagttgagcaaatagttcaatgc

SEQ ID NO: 118692 - DNA, 26 bp, Homo sapiens
ttgagttgagcaaatagttcaatgct

SEQ ID NO: 118693 - DNA, 26 bp, Homo sapiens
tgagttgagcaaatagttcaatgcta

SEQ ID NO: 118694 - DNA, 26 bp, Homo sapiens
gagttgagcaaatagttcaatgctat

SEQ ID NO: 118695 - DNA, 26 bp, Homo sapiens
agttgagcaaatagttcaatgctatc

SEQ ID NO: 118696 - DNA, 26 bp, Homo sapiens
gttgagcaaatagttcaatgctatcc

SEQ ID NO: 118697 - DNA, 26 bp, Homo sapiens
ttgagcaaatagttcaatgctatccc

SEQ ID NO: 118698 - DNA, 26 bp, Homo sapiens
tgagcaaatagttcaatgctatccct

SEQ ID NO: 118699 - DNA, 26 bp, Homo sapiens
gagcaaatagttcaatgctatcccta

SEQ ID NO: 118700 - DNA, 26 bp, Homo sapiens
agcaaatagttcaatgctatccctat

SEQ ID NO: 118701 - DNA, 26 bp, Homo sapiens
gcaaatagttcaatgctatccctatc

SEQ ID NO: 118702 - DNA, 26 bp, Homo sapiens
caaatagttcaatgctatccctatca

SEQ ID NO: 118703 - DNA, 26 bp, Homo sapiens
aaatagttcaatgctatccctatcaa

SEQ ID NO: 118704 - DNA, 26 bp, Homo sapiens
aatagttcaatgctatccctatcaaa

SEQ ID NO: 118705 - DNA, 26 bp, Homo sapiens
atagttcaatgctatccctatcaaac

SEQ ID NO: 118706 - DNA, 26 bp, Homo sapiens
tagttcaatgctatccctatcaaact

SEQ ID NO: 118707 - DNA, 26 bp, Homo sapiens
agttcaatgctatccctatcaaacta

SEQ ID NO: 118708 - DNA, 26 bp, Homo sapiens
gttcaatgctatccctatcaaactac

SEQ ID NO: 118709 - DNA, 26 bp, Homo sapiens
ttcaatgctatccctatcaaactacc

SEQ ID NO: 118710 - DNA, 26 bp, Homo sapiens
tcaatgctatccctatcaaactacca

SEQ ID NO: 118711 - DNA, 26 bp, Homo sapiens
caatgctatccctatcaaactaccaa

SEQ ID NO: 118712 - DNA, 26 bp, Homo sapiens
aatgctatccctatcaaactaccaat

SEQ ID NO: 118713 - DNA, 26 bp, Homo sapiens
atgctatccctatcaaactaccaatg

SEQ ID NO: 118714 - DNA, 26 bp, Homo sapiens
tgctatccctatcaaactaccaatga

SEQ ID NO: 118715 - DNA, 26 bp, Homo sapiens
gctatccctatcaaactaccaatgac

SEQ ID NO: 118716 - DNA, 26 bp, Homo sapiens
ctatccctatcaaactaccaatgaca

SEQ ID NO: 118717 - DNA, 26 bp, Homo sapiens
tatccctatcaaactaccaatgacat

SEQ ID NO: 118718 - DNA, 26 bp, Homo sapiens
atccctatcaaactaccaatgacatt

SEQ ID NO: 118719 - DNA, 26 bp, Homo sapiens
tccctatcaaactaccaatgacattc

SEQ ID NO: 118720 - DNA, 26 bp, Homo sapiens
ccctatcaaactaccaatgacattct

SEQ ID NO: 118721 - DNA, 26 bp, Homo sapiens
cctatcaaactaccaatgacattctt

SEQ ID NO: 118722 - DNA, 26 bp, Homo sapiens
ctatcaaactaccaatgacattcttc

SEQ ID NO: 118723 - DNA, 26 bp, Homo sapiens
tatcaaactaccaatgacattcttca

SEQ ID NO: 118724 - DNA, 26 bp, Homo sapiens
atcaaactaccaatgacattcttcac

SEQ ID NO: 118725 - DNA, 26 bp, Homo sapiens
tcaaactaccaatgacattcttcaca

SEQ ID NO: 118726 - DNA, 26 bp, Homo sapiens
caaactaccaatgacattcttcacag

SEQ ID NO: 118727 - DNA, 26 bp, Homo sapiens
aaactaccaatgacattcttcacaga

SEQ ID NO: 118728 - DNA, 26 bp, Homo sapiens
aactaccaatgacattcttcacagaa

SEQ ID NO: 118729 - DNA, 26 bp, Homo sapiens
actaccaatgacattcttcacagaat

SEQ ID NO: 118730 - DNA, 26 bp, Homo sapiens
ctaccaatgacattcttcacagaatt

SEQ ID NO: 118731 - DNA, 26 bp, Homo sapiens
taccaatgacattcttcacagaatta

SEQ ID NO: 118732 - DNA, 26 bp, Homo sapiens
accaatgacattcttcacagaattag

SEQ ID NO: 118733 - DNA, 26 bp, Homo sapiens
ccaatgacattcttcacagaattaga

SEQ ID NO: 118734 - DNA, 26 bp, Homo sapiens
caatgacattcttcacagaattagaa

SEQ ID NO: 118735 - DNA, 26 bp, Homo sapiens
aatgacattcttcacagaattagaaa

SEQ ID NO: 118736 - DNA, 26 bp, Homo sapiens
atgacattcttcacagaattagaaac

SEQ ID NO: 118737 - DNA, 26 bp, Homo sapiens
tgacattcttcacagaattagaaact

SEQ ID NO: 118738 - DNA, 26 bp, Homo sapiens
gacattcttcacagaattagaaacta

SEQ ID NO: 118739 - DNA, 26 bp, Homo sapiens
acattcttcacagaattagaaactac

SEQ ID NO: 118740 - DNA, 26 bp, Homo sapiens
cattcttcacagaattagaaactact

SEQ ID NO: 118741 - DNA, 26 bp, Homo sapiens
attcttcacagaattagaaactactt

SEQ ID NO: 118742 - DNA, 26 bp, Homo sapiens
ttcttcacagaattagaaactacttt

SEQ ID NO: 118743 - DNA, 26 bp, Homo sapiens
tcttcacagaattagaaactacttta

SEQ ID NO: 118744 - DNA, 26 bp, Homo sapiens
cttcacagaattagaaactactttaa

SEQ ID NO: 118745 - DNA, 26 bp, Homo sapiens
ttcacagaattagaaactactttaaa

SEQ ID NO: 118746 - DNA, 26 bp, Homo sapiens
tcacagaattagaaactactttaaaa

SEQ ID NO: 118747 - DNA, 26 bp, Homo sapiens
cacagaattagaaactactttaaaat

SEQ ID NO: 118748 - DNA, 26 bp, Homo sapiens
acagaattagaaactactttaaaatt

SEQ ID NO: 118749 - DNA, 26 bp, Homo sapiens
cagaattagaaactactttaaaattc

SEQ ID NO: 118750 - DNA, 26 bp, Homo sapiens
agaattagaaactactttaaaattca

SEQ ID NO: 118751 - DNA, 26 bp, Homo sapiens
gaattagaaactactttaaaattcat

SEQ ID NO: 118752 - DNA, 26 bp, Homo sapiens
aattagaaactactttaaaattcata

SEQ ID NO: 118753 - DNA, 26 bp, Homo sapiens
attagaaactactttaaaattcatat

SEQ ID NO: 118754 - DNA, 26 bp, Homo sapiens
ttagaaactactttaaaattcatatg

SEQ ID NO: 118755 - DNA, 26 bp, Homo sapiens
tagaaactactttaaaattcatatgg

SEQ ID NO: 118756 - DNA, 26 bp, Homo sapiens
agaaactactttaaaattcatatgga

SEQ ID NO: 118757 - DNA, 26 bp, Homo sapiens
gaaactactttaaaattcatatggaa

SEQ ID NO: 118758 - DNA, 26 bp, Homo sapiens
aaactactttaaaattcatatggaac

SEQ ID NO: 118759 - DNA, 26 bp, Homo sapiens
aactactttaaaattcatatggaacc

SEQ ID NO: 118760 - DNA, 26 bp, Homo sapiens
actactttaaaattcatatggaacca

SEQ ID NO: 118761 - DNA, 26 bp, Homo sapiens
ctactttaaaattcatatggaaccaa

SEQ ID NO: 118762 - DNA, 26 bp, Homo sapiens
tactttaaaattcatatggaaccaaa

SEQ ID NO: 118763 - DNA, 26 bp, Homo sapiens
actttaaaattcatatggaaccaaaa

SEQ ID NO: 118764 - DNA, 26 bp, Homo sapiens
ctttaaaattcatatggaaccaaaaa

SEQ ID NO: 118765 - DNA, 26 bp, Homo sapiens
tttaaaattcatatggaaccaaaaaa

SEQ ID NO: 118766 - DNA, 26 bp, Homo sapiens
ttaaaattcatatggaaccaaaaaag

SEQ ID NO: 118767 - DNA, 26 bp, Homo sapiens
taaaattcatatggaaccaaaaaaga

SEQ ID NO: 118768 - DNA, 26 bp, Homo sapiens
aaaattcatatggaaccaaaaaagag

SEQ ID NO: 118769 - DNA, 26 bp, Homo sapiens
aaattcatatggaaccaaaaaagagc

SEQ ID NO: 118770 - DNA, 26 bp, Homo sapiens
aattcatatggaaccaaaaaagagcc

SEQ ID NO: 118771 - DNA, 26 bp, Homo sapiens
attcatatggaaccaaaaaagagcct

SEQ ID NO: 118772 - DNA, 26 bp, Homo sapiens
ttcatatggaaccaaaaaagagccta

SEQ ID NO: 118773 - DNA, 26 bp, Homo sapiens
tcatatggaaccaaaaaagagcctag

SEQ ID NO: 118774 - DNA, 26 bp, Homo sapiens
catatggaaccaaaaaagagcctagc

SEQ ID NO: 118775 - DNA, 26 bp, Homo sapiens
atatggaaccaaaaaagagcctagcc

SEQ ID NO: 118776 - DNA, 26 bp, Homo sapiens
tatggaaccaaaaaagagcctagcca

SEQ ID NO: 118777 - DNA, 26 bp, Homo sapiens
atggaaccaaaaaagagcctagccaa

SEQ ID NO: 118778 - DNA, 26 bp, Homo sapiens
tggaaccaaaaaagagcctagccaag

SEQ ID NO: 118779 - DNA, 26 bp, Homo sapiens
ggaaccaaaaaagagcctagccaagg

SEQ ID NO: 118780 - DNA, 26 bp, Homo sapiens
gaaccaaaaaagagcctagccaaggc

SEQ ID NO: 118781 - DNA, 26 bp, Homo sapiens
aaccaaaaaagagcctagccaaggca

SEQ ID NO: 118782 - DNA, 26 bp, Homo sapiens
accaaaaaagagcctagccaaggcaa

SEQ ID NO: 118783 - DNA, 26 bp, Homo sapiens
ccaaaaaagagcctagccaaggcaat

SEQ ID NO: 118784 - DNA, 26 bp, Homo sapiens
caaaaaagagcctagccaaggcaatc

SEQ ID NO: 118785 - DNA, 26 bp, Homo sapiens
aaaaaagagcctagccaaggcaatcc

SEQ ID NO: 118786 - DNA, 26 bp, Homo sapiens
aaaaagagcctagccaaggcaatcct

SEQ ID NO: 118787 - DNA, 26 bp, Homo sapiens
aaaagagcctagccaaggcaatccta

SEQ ID NO: 118788 - DNA, 26 bp, Homo sapiens
aaagagcctagccaaggcaatcctaa

SEQ ID NO: 118789 - DNA, 26 bp, Homo sapiens
aagagcctagccaaggcaatcctaaa

SEQ ID NO: 118790 - DNA, 26 bp, Homo sapiens
agagcctagccaaggcaatcctaaac

SEQ ID NO: 118791 - DNA, 26 bp, Homo sapiens
gagcctagccaaggcaatcctaaaca

SEQ ID NO: 118792 - DNA, 26 bp, Homo sapiens
agcctagccaaggcaatcctaaacat

SEQ ID NO: 118793 - DNA, 26 bp, Homo sapiens
gcctagccaaggcaatcctaaacata

SEQ ID NO: 118794 - DNA, 26 bp, Homo sapiens
cctagccaaggcaatcctaaacataa

SEQ ID NO: 118795 - DNA, 26 bp, Homo sapiens
ctagccaaggcaatcctaaacataaa

SEQ ID NO: 118796 - DNA, 26 bp, Homo sapiens
tagccaaggcaatcctaaacataaag

SEQ ID NO: 118797 - DNA, 26 bp, Homo sapiens
agccaaggcaatcctaaacataaaga

SEQ ID NO: 118798 - DNA, 26 bp, Homo sapiens
gccaaggcaatcctaaacataaagaa

SEQ ID NO: 118799 - DNA, 26 bp, Homo sapiens
ccaaggcaatcctaaacataaagaac

SEQ ID NO: 118800 - DNA, 26 bp, Homo sapiens
caaggcaatcctaaacataaagaaca

SEQ ID NO: 118801 - DNA, 26 bp, Homo sapiens
aaggcaatcctaaacataaagaacaa

SEQ ID NO: 118802 - DNA, 26 bp, Homo sapiens
aggcaatcctaaacataaagaacaaa

SEQ ID NO: 118803 - DNA, 26 bp, Homo sapiens
ggcaatcctaaacataaagaacaaaa

SEQ ID NO: 118804 - DNA, 26 bp, Homo sapiens
gcaatcctaaacataaagaacaaaag

SEQ ID NO: 118805 - DNA, 26 bp, Homo sapiens
caatcctaaacataaagaacaaaagg

SEQ ID NO: 118806 - DNA, 26 bp, Homo sapiens
aatcctaaacataaagaacaaaaggg

SEQ ID NO: 118807 - DNA, 26 bp, Homo sapiens
atcctaaacataaagaacaaaagggg

SEQ ID NO: 118808 - DNA, 26 bp, Homo sapiens
tcctaaacataaagaacaaaagggga

SEQ ID NO: 118809 - DNA, 26 bp, Homo sapiens
cctaaacataaagaacaaaaggggag

SEQ ID NO: 118810 - DNA, 26 bp, Homo sapiens
ctaaacataaagaacaaaaggggagg

SEQ ID NO: 118811 - DNA, 26 bp, Homo sapiens
taaacataaagaacaaaaggggaggc

SEQ ID NO: 118812 - DNA, 26 bp, Homo sapiens
aaacataaagaacaaaaggggaggca

SEQ ID NO: 118813 - DNA, 26 bp, Homo sapiens
aacataaagaacaaaaggggaggcat

SEQ ID NO: 118814 - DNA, 26 bp, Homo sapiens
acataaagaacaaaaggggaggcatc

SEQ ID NO: 118815 - DNA, 26 bp, Homo sapiens
cataaagaacaaaaggggaggcatca

SEQ ID NO: 118816 - DNA, 26 bp, Homo sapiens
ataaagaacaaaaggggaggcatcaa

SEQ ID NO: 118817 - DNA, 26 bp, Homo sapiens
taaagaacaaaaggggaggcatcaag

SEQ ID NO: 118818 - DNA, 26 bp, Homo sapiens
aaagaacaaaaggggaggcatcaagt

SEQ ID NO: 118819 - DNA, 26 bp, Homo sapiens
aagaacaaaaggggaggcatcaagtt

SEQ ID NO: 118820 - DNA, 26 bp, Homo sapiens
agaacaaaaggggaggcatcaagtta

SEQ ID NO: 118821 - DNA, 26 bp, Homo sapiens
gaacaaaaggggaggcatcaagttac

SEQ ID NO: 118822 - DNA, 26 bp, Homo sapiens
aacaaaaggggaggcatcaagttacc

SEQ ID NO: 118823 - DNA, 26 bp, Homo sapiens
acaaaaggggaggcatcaagttacca

SEQ ID NO: 118824 - DNA, 26 bp, Homo sapiens
caaaaggggaggcatcaagttaccaa

SEQ ID NO: 118825 - DNA, 26 bp, Homo sapiens
aaaaggggaggcatcaagttaccaaa

SEQ ID NO: 118826 - DNA, 26 bp, Homo sapiens
aaaggggaggcatcaagttaccaaac

SEQ ID NO: 118827 - DNA, 26 bp, Homo sapiens
aaggggaggcatcaagttaccaaacc

SEQ ID NO: 118828 - DNA, 26 bp, Homo sapiens
aggggaggcatcaagttaccaaacct

SEQ ID NO: 118829 - DNA, 26 bp, Homo sapiens
ggggaggcatcaagttaccaaacctc

SEQ ID NO: 118830 - DNA, 26 bp, Homo sapiens
gggaggcatcaagttaccaaacctca

SEQ ID NO: 118831 - DNA, 26 bp, Homo sapiens
ggaggcatcaagttaccaaacctcaa

SEQ ID NO: 118832 - DNA, 26 bp, Homo sapiens
gaggcatcaagttaccaaacctcaaa

SEQ ID NO: 118833 - DNA, 26 bp, Homo sapiens
aggcatcaagttaccaaacctcaaac

SEQ ID NO: 118834 - DNA, 26 bp, Homo sapiens
ggcatcaagttaccaaacctcaaacc

SEQ ID NO: 118835 - DNA, 26 bp, Homo sapiens
gcatcaagttaccaaacctcaaacca

SEQ ID NO: 118836 - DNA, 26 bp, Homo sapiens
catcaagttaccaaacctcaaaccat

SEQ ID NO: 118837 - DNA, 26 bp, Homo sapiens
atcaagttaccaaacctcaaaccata

SEQ ID NO: 118838 - DNA, 26 bp, Homo sapiens
tcaagttaccaaacctcaaaccatac

SEQ ID NO: 118839 - DNA, 26 bp, Homo sapiens
caagttaccaaacctcaaaccatact

SEQ ID NO: 118840 - DNA, 26 bp, Homo sapiens
aagttaccaaacctcaaaccatacta

SEQ ID NO: 118841 - DNA, 26 bp, Homo sapiens
agttaccaaacctcaaaccatactac

SEQ ID NO: 118842 - DNA, 26 bp, Homo sapiens
gttaccaaacctcaaaccatactaca

SEQ ID NO: 118843 - DNA, 26 bp, Homo sapiens
ttaccaaacctcaaaccatactacag

SEQ ID NO: 118844 - DNA, 26 bp, Homo sapiens
taccaaacctcaaaccatactacaga

SEQ ID NO: 118845 - DNA, 26 bp, Homo sapiens
accaaacctcaaaccatactacagag

SEQ ID NO: 118846 - DNA, 26 bp, Homo sapiens
ccaaacctcaaaccatactacagagc

SEQ ID NO: 118847 - DNA, 26 bp, Homo sapiens
caaacctcaaaccatactacagagct

SEQ ID NO: 118848 - DNA, 26 bp, Homo sapiens
aaacctcaaaccatactacagagcta

SEQ ID NO: 118849 - DNA, 26 bp, Homo sapiens
aacctcaaaccatactacagagctac

SEQ ID NO: 118850 - DNA, 26 bp, Homo sapiens
acctcaaaccatactacagagctaca

SEQ ID NO: 118851 - DNA, 26 bp, Homo sapiens
cctcaaaccatactacagagctacag

SEQ ID NO: 118852 - DNA, 26 bp, Homo sapiens
ctcaaaccatactacagagctacagt

SEQ ID NO: 118853 - DNA, 26 bp, Homo sapiens
tcaaaccatactacagagctacagta

SEQ ID NO: 118854 - DNA, 26 bp, Homo sapiens
caaaccatactacagagctacagtaa

SEQ ID NO: 118855 - DNA, 26 bp, Homo sapiens
aaaccatactacagagctacagtaac

SEQ ID NO: 118856 - DNA, 26 bp, Homo sapiens
aaccatactacagagctacagtaacc

SEQ ID NO: 118857 - DNA, 26 bp, Homo sapiens
accatactacagagctacagtaacca

SEQ ID NO: 118858 - DNA, 26 bp, Homo sapiens
ccatactacagagctacagtaaccaa

SEQ ID NO: 118859 - DNA, 26 bp, Homo sapiens
catactacagagctacagtaaccaaa

SEQ ID NO: 118860 - DNA, 26 bp, Homo sapiens
atactacagagctacagtaaccaaaa

SEQ ID NO: 118861 - DNA, 26 bp, Homo sapiens
tactacagagctacagtaaccaaaac

SEQ ID NO: 118862 - DNA, 26 bp, Homo sapiens
actacagagctacagtaaccaaaaca

SEQ ID NO: 118863 - DNA, 26 bp, Homo sapiens
ctacagagctacagtaaccaaaacag

SEQ ID NO: 118864 - DNA, 26 bp, Homo sapiens
tacagagctacagtaaccaaaacagc

SEQ ID NO: 118865 - DNA, 26 bp, Homo sapiens
acagagctacagtaaccaaaacagca

SEQ ID NO: 118866 - DNA, 26 bp, Homo sapiens
cagagctacagtaaccaaaacagcat

SEQ ID NO: 118867 - DNA, 26 bp, Homo sapiens
agagctacagtaaccaaaacagcatg

SEQ ID NO: 118868 - DNA, 26 bp, Homo sapiens
gagctacagtaaccaaaacagcatgg

SEQ ID NO: 118869 - DNA, 26 bp, Homo sapiens
agctacagtaaccaaaacagcatggt

SEQ ID NO: 118870 - DNA, 26 bp, Homo sapiens
gctacagtaaccaaaacagcatggta

SEQ ID NO: 118871 - DNA, 26 bp, Homo sapiens
ctacagtaaccaaaacagcatggtat

SEQ ID NO: 118872 - DNA, 26 bp, Homo sapiens
tacagtaaccaaaacagcatggtatt

SEQ ID NO: 118873 - DNA, 26 bp, Homo sapiens
acagtaaccaaaacagcatggtatta

SEQ ID NO: 118874 - DNA, 26 bp, Homo sapiens
cagtaaccaaaacagcatggtattag

SEQ ID NO: 118875 - DNA, 26 bp, Homo sapiens
agtaaccaaaacagcatggtattagt

SEQ ID NO: 118876 - DNA, 26 bp, Homo sapiens
gtaaccaaaacagcatggtattagta

SEQ ID NO: 118877 - DNA, 26 bp, Homo sapiens
taaccaaaacagcatggtattagtag

SEQ ID NO: 118878 - DNA, 26 bp, Homo sapiens
aaccaaaacagcatggtattagtaga

SEQ ID NO: 118879 - DNA, 26 bp, Homo sapiens
accaaaacagcatggtattagtagaa

SEQ ID NO: 118880 - DNA, 26 bp, Homo sapiens
ccaaaacagcatggtattagtagaaa

SEQ ID NO: 118881 - DNA, 26 bp, Homo sapiens
caaaacagcatggtattagtagaaaa

SEQ ID NO: 118882 - DNA, 26 bp, Homo sapiens
aaaacagcatggtattagtagaaaaa

SEQ ID NO: 118883 - DNA, 26 bp, Homo sapiens
aaacagcatggtattagtagaaaaac

SEQ ID NO: 118884 - DNA, 26 bp, Homo sapiens
aacagcatggtattagtagaaaaaca

SEQ ID NO: 118885 - DNA, 26 bp, Homo sapiens
acagcatggtattagtagaaaaacag

SEQ ID NO: 118886 - DNA, 26 bp, Homo sapiens
cagcatggtattagtagaaaaacaga

SEQ ID NO: 118887 - DNA, 26 bp, Homo sapiens
agcatggtattagtagaaaaacagac

SEQ ID NO: 118888 - DNA, 26 bp, Homo sapiens
gcatggtattagtagaaaaacagaca

SEQ ID NO: 118889 - DNA, 26 bp, Homo sapiens
catggtattagtagaaaaacagacac

SEQ ID NO: 118890 - DNA, 26 bp, Homo sapiens
atggtattagtagaaaaacagacaca

SEQ ID NO: 118891 - DNA, 26 bp, Homo sapiens
tggtattagtagaaaaacagacacac

SEQ ID NO: 118892 - DNA, 26 bp, Homo sapiens
ggtattagtagaaaaacagacacaca

SEQ ID NO: 118893 - DNA, 26 bp, Homo sapiens
gtattagtagaaaaacagacacacag

SEQ ID NO: 118894 - DNA, 26 bp, Homo sapiens
tattagtagaaaaacagacacacaga

SEQ ID NO: 118895 - DNA, 26 bp, Homo sapiens
attagtagaaaaacagacacacagat

SEQ ID NO: 118896 - DNA, 26 bp, Homo sapiens
ttagtagaaaaacagacacacagata

SEQ ID NO: 118897 - DNA, 26 bp, Homo sapiens
tagtagaaaaacagacacacagataa

SEQ ID NO: 118898 - DNA, 26 bp, Homo sapiens
agtagaaaaacagacacacagataaa

SEQ ID NO: 118899 - DNA, 26 bp, Homo sapiens
gtagaaaaacagacacacagataaat

SEQ ID NO: 118900 - DNA, 26 bp, Homo sapiens
tagaaaaacagacacacagataaatg

SEQ ID NO: 118901 - DNA, 26 bp, Homo sapiens
agaaaaacagacacacagataaatgg

SEQ ID NO: 118902 - DNA, 26 bp, Homo sapiens
gaaaaacagacacacagataaatgga

SEQ ID NO: 118903 - DNA, 26 bp, Homo sapiens
aaaaacagacacacagataaatggaa

SEQ ID NO: 118904 - DNA, 26 bp, Homo sapiens
aaaacagacacacagataaatggaac

SEQ ID NO: 118905 - DNA, 26 bp, Homo sapiens
aaacagacacacagataaatggaaca

SEQ ID NO: 118906 - DNA, 26 bp, Homo sapiens
aacagacacacagataaatggaacat

SEQ ID NO: 118907 - DNA, 26 bp, Homo sapiens
acagacacacagataaatggaacata

SEQ ID NO: 118908 - DNA, 26 bp, Homo sapiens
cagacacacagataaatggaacataa

SEQ ID NO: 118909 - DNA, 26 bp, Homo sapiens
agacacacagataaatggaacataac

SEQ ID NO: 118910 - DNA, 26 bp, Homo sapiens
gacacacagataaatggaacataaca

SEQ ID NO: 118911 - DNA, 26 bp, Homo sapiens
acacacagataaatggaacataacag

SEQ ID NO: 118912 - DNA, 26 bp, Homo sapiens
cacacagataaatggaacataacaga

SEQ ID NO: 118913 - DNA, 26 bp, Homo sapiens
acacagataaatggaacataacagag

SEQ ID NO: 118914 - DNA, 26 bp, Homo sapiens
cacagataaatggaacataacagaga

SEQ ID NO: 118915 - DNA, 26 bp, Homo sapiens
acagataaatggaacataacagagag

SEQ ID NO: 118916 - DNA, 26 bp, Homo sapiens
cagataaatggaacataacagagagt

SEQ ID NO: 118917 - DNA, 26 bp, Homo sapiens
agataaatggaacataacagagagtc

SEQ ID NO: 118918 - DNA, 26 bp, Homo sapiens
gataaatggaacataacagagagtcc

SEQ ID NO: 118919 - DNA, 26 bp, Homo sapiens
ataaatggaacataacagagagtcca

SEQ ID NO: 118920 - DNA, 26 bp, Homo sapiens
taaatggaacataacagagagtccag

SEQ ID NO: 118921 - DNA, 26 bp, Homo sapiens
aaatggaacataacagagagtccaga

SEQ ID NO: 118922 - DNA, 26 bp, Homo sapiens
aatggaacataacagagagtccagaa

SEQ ID NO: 118923 - DNA, 26 bp, Homo sapiens
atggaacataacagagagtccagaaa

SEQ ID NO: 118924 - DNA, 26 bp, Homo sapiens
tggaacataacagagagtccagaaat

SEQ ID NO: 118925 - DNA, 26 bp, Homo sapiens
ggaacataacagagagtccagaaata

SEQ ID NO: 118926 - DNA, 26 bp, Homo sapiens
gaacataacagagagtccagaaataa

SEQ ID NO: 118927 - DNA, 26 bp, Homo sapiens
aacataacagagagtccagaaataat

SEQ ID NO: 118928 - DNA, 26 bp, Homo sapiens
acataacagagagtccagaaataatg

SEQ ID NO: 118929 - DNA, 26 bp, Homo sapiens
cataacagagagtccagaaataatgc

SEQ ID NO: 118930 - DNA, 26 bp, Homo sapiens
ataacagagagtccagaaataatgct

SEQ ID NO: 118931 - DNA, 26 bp, Homo sapiens
taacagagagtccagaaataatgctg

SEQ ID NO: 118932 - DNA, 26 bp, Homo sapiens
aacagagagtccagaaataatgctgt

SEQ ID NO: 118933 - DNA, 26 bp, Homo sapiens
acagagagtccagaaataatgctgta

SEQ ID NO: 118934 - DNA, 26 bp, Homo sapiens
cagagagtccagaaataatgctgtac

SEQ ID NO: 118935 - DNA, 26 bp, Homo sapiens
agagagtccagaaataatgctgtaca

SEQ ID NO: 118936 - DNA, 26 bp, Homo sapiens
gagagtccagaaataatgctgtacac

SEQ ID NO: 118937 - DNA, 26 bp, Homo sapiens
agagtccagaaataatgctgtacacc

SEQ ID NO: 118938 - DNA, 26 bp, Homo sapiens
gagtccagaaataatgctgtacacct

SEQ ID NO: 118939 - DNA, 26 bp, Homo sapiens
agtccagaaataatgctgtacaccta

SEQ ID NO: 118940 - DNA, 26 bp, Homo sapiens
gtccagaaataatgctgtacacctac

SEQ ID NO: 118941 - DNA, 26 bp, Homo sapiens
tccagaaataatgctgtacacctaca

SEQ ID NO: 118942 - DNA, 26 bp, Homo sapiens
ccagaaataatgctgtacacctacaa

SEQ ID NO: 118943 - DNA, 26 bp, Homo sapiens
cagaaataatgctgtacacctacaat

SEQ ID NO: 118944 - DNA, 26 bp, Homo sapiens
agaaataatgctgtacacctacaatc

SEQ ID NO: 118945 - DNA, 26 bp, Homo sapiens
gaaataatgctgtacacctacaatca

SEQ ID NO: 118946 - DNA, 26 bp, Homo sapiens
aaataatgctgtacacctacaatcat

SEQ ID NO: 118947 - DNA, 26 bp, Homo sapiens
aataatgctgtacacctacaatcatc

SEQ ID NO: 118948 - DNA, 26 bp, Homo sapiens
ataatgctgtacacctacaatcatct

SEQ ID NO: 118949 - DNA, 26 bp, Homo sapiens
taatgctgtacacctacaatcatctg

SEQ ID NO: 118950 - DNA, 26 bp, Homo sapiens
aatgctgtacacctacaatcatctga

SEQ ID NO: 118951 - DNA, 26 bp, Homo sapiens
atgctgtacacctacaatcatctgat

SEQ ID NO: 118952 - DNA, 26 bp, Homo sapiens
tgctgtacacctacaatcatctgatc

SEQ ID NO: 118953 - DNA, 26 bp, Homo sapiens
gctgtacacctacaatcatctgatct

SEQ ID NO: 118954 - DNA, 26 bp, Homo sapiens
ctgtacacctacaatcatctgatctt

SEQ ID NO: 118955 - DNA, 26 bp, Homo sapiens
tgtacacctacaatcatctgatcttg

SEQ ID NO: 118956 - DNA, 26 bp, Homo sapiens
gtacacctacaatcatctgatcttgg

SEQ ID NO: 118957 - DNA, 26 bp, Homo sapiens
tacacctacaatcatctgatcttgga

SEQ ID NO: 118958 - DNA, 26 bp, Homo sapiens
acacctacaatcatctgatcttggac

SEQ ID NO: 118959 - DNA, 26 bp, Homo sapiens
cacctacaatcatctgatcttggaca

SEQ ID NO: 118960 - DNA, 26 bp, Homo sapiens
acctacaatcatctgatcttggacaa

SEQ ID NO: 118961 - DNA, 26 bp, Homo sapiens
cctacaatcatctgatcttggacaaa

SEQ ID NO: 118962 - DNA, 26 bp, Homo sapiens
ctacaatcatctgatcttggacaaag

SEQ ID NO: 118963 - DNA, 26 bp, Homo sapiens
tacaatcatctgatcttggacaaagc

SEQ ID NO: 118964 - DNA, 26 bp, Homo sapiens
acaatcatctgatcttggacaaagct

SEQ ID NO: 118965 - DNA, 26 bp, Homo sapiens
caatcatctgatcttggacaaagctg

SEQ ID NO: 118966 - DNA, 26 bp, Homo sapiens
aatcatctgatcttggacaaagctga

SEQ ID NO: 118967 - DNA, 26 bp, Homo sapiens
atcatctgatcttggacaaagctgac

SEQ ID NO: 118968 - DNA, 26 bp, Homo sapiens
tcatctgatcttggacaaagctgaca

SEQ ID NO: 118969 - DNA, 26 bp, Homo sapiens
catctgatcttggacaaagctgacaa

SEQ ID NO: 118970 - DNA, 26 bp, Homo sapiens
atctgatcttggacaaagctgacaaa

SEQ ID NO: 118971 - DNA, 26 bp, Homo sapiens
tctgatcttggacaaagctgacaaaa

SEQ ID NO: 118972 - DNA, 26 bp, Homo sapiens
ctgatcttggacaaagctgacaaaaa

SEQ ID NO: 118973 - DNA, 26 bp, Homo sapiens
tgatcttggacaaagctgacaaaaac

SEQ ID NO: 118974 - DNA, 26 bp, Homo sapiens
gatcttggacaaagctgacaaaaaca

SEQ ID NO: 118975 - DNA, 26 bp, Homo sapiens
atcttggacaaagctgacaaaaacaa

SEQ ID NO: 118976 - DNA, 26 bp, Homo sapiens
tcttggacaaagctgacaaaaacaag

SEQ ID NO: 118977 - DNA, 26 bp, Homo sapiens
cttggacaaagctgacaaaaacaagc

SEQ ID NO: 118978 - DNA, 26 bp, Homo sapiens
ttggacaaagctgacaaaaacaagca

SEQ ID NO: 118979 - DNA, 26 bp, Homo sapiens
tggacaaagctgacaaaaacaagcaa

SEQ ID NO: 118980 - DNA, 26 bp, Homo sapiens
ggacaaagctgacaaaaacaagcaat

SEQ ID NO: 118981 - DNA, 26 bp, Homo sapiens
gacaaagctgacaaaaacaagcaatg

SEQ ID NO: 118982 - DNA, 26 bp, Homo sapiens
acaaagctgacaaaaacaagcaatgg

SEQ ID NO: 118983 - DNA, 26 bp, Homo sapiens
caaagctgacaaaaacaagcaatggg

SEQ ID NO: 118984 - DNA, 26 bp, Homo sapiens
aaagctgacaaaaacaagcaatgggg

SEQ ID NO: 118985 - DNA, 26 bp, Homo sapiens
aagctgacaaaaacaagcaatgggga

SEQ ID NO: 118986 - DNA, 26 bp, Homo sapiens
agctgacaaaaacaagcaatggggaa

SEQ ID NO: 118987 - DNA, 26 bp, Homo sapiens
gctgacaaaaacaagcaatggggaaa

SEQ ID NO: 118988 - DNA, 26 bp, Homo sapiens
ctgacaaaaacaagcaatggggaaag

SEQ ID NO: 118989 - DNA, 26 bp, Homo sapiens
tgacaaaaacaagcaatggggaaaga

SEQ ID NO: 118990 - DNA, 26 bp, Homo sapiens
gacaaaaacaagcaatggggaaagaa

SEQ ID NO: 118991 - DNA, 26 bp, Homo sapiens
acaaaaacaagcaatggggaaagaag

SEQ ID NO: 118992 - DNA, 26 bp, Homo sapiens
caaaaacaagcaatggggaaagaagt

SEQ ID NO: 118993 - DNA, 26 bp, Homo sapiens
aaaaacaagcaatggggaaagaagtc

SEQ ID NO: 118994 - DNA, 26 bp, Homo sapiens
aaaacaagcaatggggaaagaagtcc

SEQ ID NO: 118995 - DNA, 26 bp, Homo sapiens
aaacaagcaatggggaaagaagtccc

SEQ ID NO: 118996 - DNA, 26 bp, Homo sapiens
aacaagcaatggggaaagaagtcccc

SEQ ID NO: 118997 - DNA, 26 bp, Homo sapiens
acaagcaatggggaaagaagtcccca

SEQ ID NO: 118998 - DNA, 26 bp, Homo sapiens
caagcaatggggaaagaagtccccat

SEQ ID NO: 118999 - DNA, 26 bp, Homo sapiens
aagcaatggggaaagaagtccccatt

SEQ ID NO: 119000 - DNA, 26 bp, Homo sapiens
agcaatggggaaagaagtccccattt

SEQ ID NO: 119001 - DNA, 26 bp, Homo sapiens
gcaatggggaaagaagtccccattta

SEQ ID NO: 119002 - DNA, 26 bp, Homo sapiens
caatggggaaagaagtccccatttaa

SEQ ID NO: 119003 - DNA, 26 bp, Homo sapiens
aatggggaaagaagtccccatttaat

SEQ ID NO: 119004 - DNA, 26 bp, Homo sapiens
atggggaaagaagtccccatttaata

SEQ ID NO: 119005 - DNA, 26 bp, Homo sapiens
tggggaaagaagtccccatttaataa

SEQ ID NO: 119006 - DNA, 26 bp, Homo sapiens
ggggaaagaagtccccatttaataaa

SEQ ID NO: 119007 - DNA, 26 bp, Homo sapiens
gggaaagaagtccccatttaataaat

SEQ ID NO: 119008 - DNA, 26 bp, Homo sapiens
ggaaagaagtccccatttaataaatg

SEQ ID NO: 119009 - DNA, 26 bp, Homo sapiens
gaaagaagtccccatttaataaatgg

SEQ ID NO: 119010 - DNA, 26 bp, Homo sapiens
aaagaagtccccatttaataaatggt

SEQ ID NO: 119011 - DNA, 26 bp, Homo sapiens
aagaagtccccatttaataaatggtg

SEQ ID NO: 119012 - DNA, 26 bp, Homo sapiens
agaagtccccatttaataaatggtgc

SEQ ID NO: 119013 - DNA, 26 bp, Homo sapiens
gaagtccccatttaataaatggtgct

SEQ ID NO: 119014 - DNA, 26 bp, Homo sapiens
aagtccccatttaataaatggtgctg

SEQ ID NO: 119015 - DNA, 26 bp, Homo sapiens
agtccccatttaataaatggtgctgg

SEQ ID NO: 119016 - DNA, 26 bp, Homo sapiens
gtccccatttaataaatggtgctggg

SEQ ID NO: 119017 - DNA, 26 bp, Homo sapiens
tccccatttaataaatggtgctggga

SEQ ID NO: 119018 - DNA, 26 bp, Homo sapiens
ccccatttaataaatggtgctgggat

SEQ ID NO: 119019 - DNA, 26 bp, Homo sapiens
cccatttaataaatggtgctgggatt

SEQ ID NO: 119020 - DNA, 26 bp, Homo sapiens
ccatttaataaatggtgctgggatta

SEQ ID NO: 119021 - DNA, 26 bp, Homo sapiens
catttaataaatggtgctgggattac

SEQ ID NO: 119022 - DNA, 26 bp, Homo sapiens
atttaataaatggtgctgggattact

SEQ ID NO: 119023 - DNA, 26 bp, Homo sapiens
tttaataaatggtgctgggattactg

SEQ ID NO: 119024 - DNA, 26 bp, Homo sapiens
ttaataaatggtgctgggattactgg

SEQ ID NO: 119025 - DNA, 26 bp, Homo sapiens
taataaatggtgctgggattactggc

SEQ ID NO: 119026 - DNA, 26 bp, Homo sapiens
aataaatggtgctgggattactggct

SEQ ID NO: 119027 - DNA, 26 bp, Homo sapiens
ataaatggtgctgggattactggcta

SEQ ID NO: 119028 - DNA, 26 bp, Homo sapiens
taaatggtgctgggattactggctag

SEQ ID NO: 119029 - DNA, 26 bp, Homo sapiens
aaatggtgctgggattactggctagc

SEQ ID NO: 119030 - DNA, 26 bp, Homo sapiens
aatggtgctgggattactggctagcc

SEQ ID NO: 119031 - DNA, 26 bp, Homo sapiens
atggtgctgggattactggctagcca

SEQ ID NO: 119032 - DNA, 26 bp, Homo sapiens
tggtgctgggattactggctagccat

SEQ ID NO: 119033 - DNA, 26 bp, Homo sapiens
ggtgctgggattactggctagccata

SEQ ID NO: 119034 - DNA, 26 bp, Homo sapiens
gtgctgggattactggctagccatat

SEQ ID NO: 119035 - DNA, 26 bp, Homo sapiens
tgctgggattactggctagccatatg

SEQ ID NO: 119036 - DNA, 26 bp, Homo sapiens
gctgggattactggctagccatatgc

SEQ ID NO: 119037 - DNA, 26 bp, Homo sapiens
ctgggattactggctagccatatgca

SEQ ID NO: 119038 - DNA, 26 bp, Homo sapiens
tgggattactggctagccatatgcag

SEQ ID NO: 119039 - DNA, 26 bp, Homo sapiens
gggattactggctagccatatgcaga

SEQ ID NO: 119040 - DNA, 26 bp, Homo sapiens
ggattactggctagccatatgcagaa

SEQ ID NO: 119041 - DNA, 26 bp, Homo sapiens
gattactggctagccatatgcagaag

SEQ ID NO: 119042 - DNA, 26 bp, Homo sapiens
attactggctagccatatgcagaaga

SEQ ID NO: 119043 - DNA, 26 bp, Homo sapiens
ttactggctagccatatgcagaagat

SEQ ID NO: 119044 - DNA, 26 bp, Homo sapiens
tactggctagccatatgcagaagatt

SEQ ID NO: 119045 - DNA, 26 bp, Homo sapiens
actggctagccatatgcagaagattg

SEQ ID NO: 119046 - DNA, 26 bp, Homo sapiens
ctggctagccatatgcagaagattga

SEQ ID NO: 119047 - DNA, 26 bp, Homo sapiens
tggctagccatatgcagaagattgaa

SEQ ID NO: 119048 - DNA, 26 bp, Homo sapiens
ggctagccatatgcagaagattgaaa

SEQ ID NO: 119049 - DNA, 26 bp, Homo sapiens
gctagccatatgcagaagattgaaac

SEQ ID NO: 119050 - DNA, 26 bp, Homo sapiens
ctagccatatgcagaagattgaaact

SEQ ID NO: 119051 - DNA, 26 bp, Homo sapiens
tagccatatgcagaagattgaaactg

SEQ ID NO: 119052 - DNA, 26 bp, Homo sapiens
agccatatgcagaagattgaaactgg

SEQ ID NO: 119053 - DNA, 26 bp, Homo sapiens
gccatatgcagaagattgaaactggg

SEQ ID NO: 119054 - DNA, 26 bp, Homo sapiens
ccatatgcagaagattgaaactgggc

SEQ ID NO: 119055 - DNA, 26 bp, Homo sapiens
catatgcagaagattgaaactgggcc

SEQ ID NO: 119056 - DNA, 26 bp, Homo sapiens
atatgcagaagattgaaactgggccc

SEQ ID NO: 119057 - DNA, 26 bp, Homo sapiens
tatgcagaagattgaaactgggcccc

SEQ ID NO: 119058 - DNA, 26 bp, Homo sapiens
atgcagaagattgaaactgggccccc

SEQ ID NO: 119059 - DNA, 26 bp, Homo sapiens
tgcagaagattgaaactgggccccca

SEQ ID NO: 119060 - DNA, 26 bp, Homo sapiens
gcagaagattgaaactgggcccccag

SEQ ID NO: 119061 - DNA, 26 bp, Homo sapiens
cagaagattgaaactgggcccccagc

SEQ ID NO: 119062 - DNA, 26 bp, Homo sapiens
agaagattgaaactgggcccccagct

SEQ ID NO: 119063 - DNA, 26 bp, Homo sapiens
gaagattgaaactgggcccccagctt

SEQ ID NO: 119064 - DNA, 26 bp, Homo sapiens
aagattgaaactgggcccccagctta

SEQ ID NO: 119065 - DNA, 26 bp, Homo sapiens
agattgaaactgggcccccagcttac

SEQ ID NO: 119066 - DNA, 26 bp, Homo sapiens
gattgaaactgggcccccagcttact

SEQ ID NO: 119067 - DNA, 26 bp, Homo sapiens
attgaaactgggcccccagcttactc

SEQ ID NO: 119068 - DNA, 26 bp, Homo sapiens
ttgaaactgggcccccagcttactct

SEQ ID NO: 119069 - DNA, 26 bp, Homo sapiens
tgaaactgggcccccagcttactctg

SEQ ID NO: 119070 - DNA, 26 bp, Homo sapiens
gaaactgggcccccagcttactctgc

SEQ ID NO: 119071 - DNA, 26 bp, Homo sapiens
aaactgggcccccagcttactctgca

SEQ ID NO: 119072 - DNA, 26 bp, Homo sapiens
aactgggcccccagcttactctgcat

SEQ ID NO: 119073 - DNA, 26 bp, Homo sapiens
actgggcccccagcttactctgcata

SEQ ID NO: 119074 - DNA, 26 bp, Homo sapiens
ctgggcccccagcttactctgcatac

SEQ ID NO: 119075 - DNA, 26 bp, Homo sapiens
tgggcccccagcttactctgcataca

SEQ ID NO: 119076 - DNA, 26 bp, Homo sapiens
gggcccccagcttactctgcatacaa

SEQ ID NO: 119077 - DNA, 26 bp, Homo sapiens
ggcccccagcttactctgcatacaaa

SEQ ID NO: 119078 - DNA, 26 bp, Homo sapiens
gcccccagcttactctgcatacaaaa

SEQ ID NO: 119079 - DNA, 26 bp, Homo sapiens
cccccagcttactctgcatacaaaaa

SEQ ID NO: 119080 - DNA, 26 bp, Homo sapiens
ccccagcttactctgcatacaaaaat

SEQ ID NO: 119081 - DNA, 26 bp, Homo sapiens
cccagcttactctgcatacaaaaatc

SEQ ID NO: 119082 - DNA, 26 bp, Homo sapiens
ccagcttactctgcatacaaaaatca

SEQ ID NO: 119083 - DNA, 26 bp, Homo sapiens
cagcttactctgcatacaaaaatcaa

SEQ ID NO: 119084 - DNA, 26 bp, Homo sapiens
agcttactctgcatacaaaaatcaac

SEQ ID NO: 119085 - DNA, 26 bp, Homo sapiens
gcttactctgcatacaaaaatcaact

SEQ ID NO: 119086 - DNA, 26 bp, Homo sapiens
cttactctgcatacaaaaatcaactt

SEQ ID NO: 119087 - DNA, 26 bp, Homo sapiens
ttactctgcatacaaaaatcaactta

SEQ ID NO: 119088 - DNA, 26 bp, Homo sapiens
tactctgcatacaaaaatcaacttaa

SEQ ID NO: 119089 - DNA, 26 bp, Homo sapiens
actctgcatacaaaaatcaacttaag

SEQ ID NO: 119090 - DNA, 26 bp, Homo sapiens
ctctgcatacaaaaatcaacttaaga

SEQ ID NO: 119091 - DNA, 26 bp, Homo sapiens
tctgcatacaaaaatcaacttaagaa

SEQ ID NO: 119092 - DNA, 26 bp, Homo sapiens
ctgcatacaaaaatcaacttaagaag

SEQ ID NO: 119093 - DNA, 26 bp, Homo sapiens
tgcatacaaaaatcaacttaagaagg

SEQ ID NO: 119094 - DNA, 26 bp, Homo sapiens
gcatacaaaaatcaacttaagaagga

SEQ ID NO: 119095 - DNA, 26 bp, Homo sapiens
catacaaaaatcaacttaagaaggat

SEQ ID NO: 119096 - DNA, 26 bp, Homo sapiens
atacaaaaatcaacttaagaaggatt

SEQ ID NO: 119097 - DNA, 26 bp, Homo sapiens
tacaaaaatcaacttaagaaggatta

SEQ ID NO: 119098 - DNA, 26 bp, Homo sapiens
acaaaaatcaacttaagaaggattaa

SEQ ID NO: 119099 - DNA, 26 bp, Homo sapiens
caaaaatcaacttaagaaggattaaa

SEQ ID NO: 119100 - DNA, 26 bp, Homo sapiens
aaaaatcaacttaagaaggattaaag

SEQ ID NO: 119101 - DNA, 26 bp, Homo sapiens
aaaatcaacttaagaaggattaaaga

SEQ ID NO: 119102 - DNA, 26 bp, Homo sapiens
aaatcaacttaagaaggattaaagac

SEQ ID NO: 119103 - DNA, 26 bp, Homo sapiens
aatcaacttaagaaggattaaagact

SEQ ID NO: 119104 - DNA, 26 bp, Homo sapiens
atcaacttaagaaggattaaagactt

SEQ ID NO: 119105 - DNA, 26 bp, Homo sapiens
tcaacttaagaaggattaaagactta

SEQ ID NO: 119106 - DNA, 26 bp, Homo sapiens
caacttaagaaggattaaagacttaa

SEQ ID NO: 119107 - DNA, 26 bp, Homo sapiens
aacttaagaaggattaaagacttaaa

SEQ ID NO: 119108 - DNA, 26 bp, Homo sapiens
acttaagaaggattaaagacttaaat

SEQ ID NO: 119109 - DNA, 26 bp, Homo sapiens
cttaagaaggattaaagacttaaata

SEQ ID NO: 119110 - DNA, 26 bp, Homo sapiens
ttaagaaggattaaagacttaaatat

SEQ ID NO: 119111 - DNA, 26 bp, Homo sapiens
taagaaggattaaagacttaaatata

SEQ ID NO: 119112 - DNA, 26 bp, Homo sapiens
aagaaggattaaagacttaaatataa

SEQ ID NO: 119113 - DNA, 26 bp, Homo sapiens
agaaggattaaagacttaaatataaa

SEQ ID NO: 119114 - DNA, 26 bp, Homo sapiens
gaaggattaaagacttaaatataaaa

SEQ ID NO: 119115 - DNA, 26 bp, Homo sapiens
aaggattaaagacttaaatataaaac

SEQ ID NO: 119116 - DNA, 26 bp, Homo sapiens
aggattaaagacttaaatataaaaca

SEQ ID NO: 119117 - DNA, 26 bp, Homo sapiens
ggattaaagacttaaatataaaacat

SEQ ID NO: 119118 - DNA, 26 bp, Homo sapiens
gattaaagacttaaatataaaacatt

SEQ ID NO: 119119 - DNA, 26 bp, Homo sapiens
attaaagacttaaatataaaacatta

SEQ ID NO: 119120 - DNA, 26 bp, Homo sapiens
ttaaagacttaaatataaaacattaa

SEQ ID NO: 119121 - DNA, 26 bp, Homo sapiens
taaagacttaaatataaaacattaaa

SEQ ID NO: 119122 - DNA, 26 bp, Homo sapiens
aaagacttaaatataaaacattaaac

SEQ ID NO: 119123 - DNA, 26 bp, Homo sapiens
aagacttaaatataaaacattaaact

SEQ ID NO: 119124 - DNA, 26 bp, Homo sapiens
agacttaaatataaaacattaaacta

SEQ ID NO: 119125 - DNA, 26 bp, Homo sapiens
gacttaaatataaaacattaaactat

SEQ ID NO: 119126 - DNA, 26 bp, Homo sapiens
acttaaatataaaacattaaactata

SEQ ID NO: 119127 - DNA, 26 bp, Homo sapiens
cttaaatataaaacattaaactataa

SEQ ID NO: 119128 - DNA, 26 bp, Homo sapiens
ttaaatataaaacattaaactataaa

SEQ ID NO: 119129 - DNA, 26 bp, Homo sapiens
taaatataaaacattaaactataaaa

SEQ ID NO: 119130 - DNA, 26 bp, Homo sapiens
aaatataaaacattaaactataaaaa

SEQ ID NO: 119131 - DNA, 26 bp, Homo sapiens
aatataaaacattaaactataaaaac

SEQ ID NO: 119132 - DNA, 26 bp, Homo sapiens
atataaaacattaaactataaaaact

SEQ ID NO: 119133 - DNA, 26 bp, Homo sapiens
tataaaacattaaactataaaaactc

SEQ ID NO: 119134 - DNA, 26 bp, Homo sapiens
ataaaacattaaactataaaaactct

SEQ ID NO: 119135 - DNA, 26 bp, Homo sapiens
taaaacattaaactataaaaactctg

SEQ ID NO: 119136 - DNA, 26 bp, Homo sapiens
aaaacattaaactataaaaactctga

SEQ ID NO: 119137 - DNA, 26 bp, Homo sapiens
aaacattaaactataaaaactctgaa

SEQ ID NO: 119138 - DNA, 26 bp, Homo sapiens
aacattaaactataaaaactctgaaa

SEQ ID NO: 119139 - DNA, 26 bp, Homo sapiens
acattaaactataaaaactctgaaaa

SEQ ID NO: 119140 - DNA, 26 bp, Homo sapiens
cattaaactataaaaactctgaaaaa

SEQ ID NO: 119141 - DNA, 26 bp, Homo sapiens
attaaactataaaaactctgaaaaat

SEQ ID NO: 119142 - DNA, 26 bp, Homo sapiens
ttaaactataaaaactctgaaaaata

SEQ ID NO: 119143 - DNA, 26 bp, Homo sapiens
taaactataaaaactctgaaaaataa

SEQ ID NO: 119144 - DNA, 26 bp, Homo sapiens
aaactataaaaactctgaaaaataac

SEQ ID NO: 119145 - DNA, 26 bp, Homo sapiens
aactataaaaactctgaaaaataacc

SEQ ID NO: 119146 - DNA, 26 bp, Homo sapiens
actataaaaactctgaaaaataacct

SEQ ID NO: 119147 - DNA, 26 bp, Homo sapiens
ctataaaaactctgaaaaataaccta

SEQ ID NO: 119148 - DNA, 26 bp, Homo sapiens
tataaaaactctgaaaaataacctaa

SEQ ID NO: 119149 - DNA, 26 bp, Homo sapiens
ataaaaactctgaaaaataacctaag

SEQ ID NO: 119150 - DNA, 26 bp, Homo sapiens
taaaaactctgaaaaataacctaaga

SEQ ID NO: 119151 - DNA, 26 bp, Homo sapiens
aaaaactctgaaaaataacctaagaa

SEQ ID NO: 119152 - DNA, 26 bp, Homo sapiens
aaaactctgaaaaataacctaagaaa

SEQ ID NO: 119153 - DNA, 26 bp, Homo sapiens
aaactctgaaaaataacctaagaaat

SEQ ID NO: 119154 - DNA, 26 bp, Homo sapiens
aactctgaaaaataacctaagaaata

SEQ ID NO: 119155 - DNA, 26 bp, Homo sapiens
actctgaaaaataacctaagaaatac

SEQ ID NO: 119156 - DNA, 26 bp, Homo sapiens
ctctgaaaaataacctaagaaatacc

SEQ ID NO: 119157 - DNA, 26 bp, Homo sapiens
tctgaaaaataacctaagaaatacca

SEQ ID NO: 119158 - DNA, 26 bp, Homo sapiens
ctgaaaaataacctaagaaataccat

SEQ ID NO: 119159 - DNA, 26 bp, Homo sapiens
tgaaaaataacctaagaaataccatt

SEQ ID NO: 119160 - DNA, 26 bp, Homo sapiens
gaaaaataacctaagaaataccattc

SEQ ID NO: 119161 - DNA, 26 bp, Homo sapiens
aaaaataacctaagaaataccattct

SEQ ID NO: 119162 - DNA, 26 bp, Homo sapiens
aaaataacctaagaaataccattctg

SEQ ID NO: 119163 - DNA, 26 bp, Homo sapiens
aaataacctaagaaataccattctgg

SEQ ID NO: 119164 - DNA, 26 bp, Homo sapiens
aataacctaagaaataccattctgga

SEQ ID NO: 119165 - DNA, 26 bp, Homo sapiens
ataacctaagaaataccattctggac

SEQ ID NO: 119166 - DNA, 26 bp, Homo sapiens
taacctaagaaataccattctggaca

SEQ ID NO: 119167 - DNA, 26 bp, Homo sapiens
aacctaagaaataccattctggacat

SEQ ID NO: 119168 - DNA, 26 bp, Homo sapiens
acctaagaaataccattctggacata

SEQ ID NO: 119169 - DNA, 26 bp, Homo sapiens
cctaagaaataccattctggacataa

SEQ ID NO: 119170 - DNA, 26 bp, Homo sapiens
ctaagaaataccattctggacataag

SEQ ID NO: 119171 - DNA, 26 bp, Homo sapiens
taagaaataccattctggacataaga

SEQ ID NO: 119172 - DNA, 26 bp, Homo sapiens
aagaaataccattctggacataagac

SEQ ID NO: 119173 - DNA, 26 bp, Homo sapiens
agaaataccattctggacataagact

SEQ ID NO: 119174 - DNA, 26 bp, Homo sapiens
gaaataccattctggacataagactt

SEQ ID NO: 119175 - DNA, 26 bp, Homo sapiens
aaataccattctggacataagacttg

SEQ ID NO: 119176 - DNA, 26 bp, Homo sapiens
aataccattctggacataagacttgg

SEQ ID NO: 119177 - DNA, 26 bp, Homo sapiens
ataccattctggacataagacttggc

SEQ ID NO: 119178 - DNA, 26 bp, Homo sapiens
taccattctggacataagacttggct

SEQ ID NO: 119179 - DNA, 26 bp, Homo sapiens
accattctggacataagacttggcta

SEQ ID NO: 119180 - DNA, 26 bp, Homo sapiens
ccattctggacataagacttggctaa

SEQ ID NO: 119181 - DNA, 26 bp, Homo sapiens
cattctggacataagacttggctaaa

SEQ ID NO: 119182 - DNA, 26 bp, Homo sapiens
attctggacataagacttggctaaaa

SEQ ID NO: 119183 - DNA, 26 bp, Homo sapiens
ttctggacataagacttggctaaaat

SEQ ID NO: 119184 - DNA, 26 bp, Homo sapiens
tctggacataagacttggctaaaatt

SEQ ID NO: 119185 - DNA, 26 bp, Homo sapiens
ctggacataagacttggctaaaattt

SEQ ID NO: 119186 - DNA, 26 bp, Homo sapiens
tggacataagacttggctaaaatttc

SEQ ID NO: 119187 - DNA, 26 bp, Homo sapiens
ggacataagacttggctaaaatttca

SEQ ID NO: 119188 - DNA, 26 bp, Homo sapiens
gacataagacttggctaaaatttcat

SEQ ID NO: 119189 - DNA, 26 bp, Homo sapiens
acataagacttggctaaaatttcatg

SEQ ID NO: 119190 - DNA, 26 bp, Homo sapiens
cataagacttggctaaaatttcatga

SEQ ID NO: 119191 - DNA, 26 bp, Homo sapiens
ataagacttggctaaaatttcatgat

SEQ ID NO: 119192 - DNA, 26 bp, Homo sapiens
taagacttggctaaaatttcatgatg

SEQ ID NO: 119193 - DNA, 26 bp, Homo sapiens
aagacttggctaaaatttcatgatga

SEQ ID NO: 119194 - DNA, 26 bp, Homo sapiens
agacttggctaaaatttcatgatgaa

SEQ ID NO: 119195 - DNA, 26 bp, Homo sapiens
gacttggctaaaatttcatgatgaag

SEQ ID NO: 119196 - DNA, 26 bp, Homo sapiens
acttggctaaaatttcatgatgaaga

SEQ ID NO: 119197 - DNA, 26 bp, Homo sapiens
cttggctaaaatttcatgatgaagat

SEQ ID NO: 119198 - DNA, 26 bp, Homo sapiens
ttggctaaaatttcatgatgaagata

SEQ ID NO: 119199 - DNA, 26 bp, Homo sapiens
tggctaaaatttcatgatgaagataa

SEQ ID NO: 119200 - DNA, 26 bp, Homo sapiens
ggctaaaatttcatgatgaagataac

SEQ ID NO: 119201 - DNA, 26 bp, Homo sapiens
gctaaaatttcatgatgaagataaca

SEQ ID NO: 119202 - DNA, 26 bp, Homo sapiens
ctaaaatttcatgatgaagataacat

SEQ ID NO: 119203 - DNA, 26 bp, Homo sapiens
taaaatttcatgatgaagataacata

SEQ ID NO: 119204 - DNA, 26 bp, Homo sapiens
aaaatttcatgatgaagataacataa

SEQ ID NO: 119205 - DNA, 26 bp, Homo sapiens
aaatttcatgatgaagataacataag

SEQ ID NO: 119206 - DNA, 26 bp, Homo sapiens
aatttcatgatgaagataacataagc

SEQ ID NO: 119207 - DNA, 26 bp, Homo sapiens
atttcatgatgaagataacataagca

SEQ ID NO: 119208 - DNA, 26 bp, Homo sapiens
tttcatgatgaagataacataagcaa

SEQ ID NO: 119209 - DNA, 26 bp, Homo sapiens
ttcatgatgaagataacataagcaat

SEQ ID NO: 119210 - DNA, 26 bp, Homo sapiens
tcatgatgaagataacataagcaatt

SEQ ID NO: 119211 - DNA, 26 bp, Homo sapiens
catgatgaagataacataagcaattg

SEQ ID NO: 119212 - DNA, 26 bp, Homo sapiens
atgatgaagataacataagcaattgc

SEQ ID NO: 119213 - DNA, 26 bp, Homo sapiens
tgatgaagataacataagcaattgca

SEQ ID NO: 119214 - DNA, 26 bp, Homo sapiens
gatgaagataacataagcaattgcag

SEQ ID NO: 119215 - DNA, 26 bp, Homo sapiens
atgaagataacataagcaattgcagc

SEQ ID NO: 119216 - DNA, 26 bp, Homo sapiens
tgaagataacataagcaattgcagca

SEQ ID NO: 119217 - DNA, 26 bp, Homo sapiens
gaagataacataagcaattgcagcaa

SEQ ID NO: 119218 - DNA, 26 bp, Homo sapiens
aagataacataagcaattgcagcaaa

SEQ ID NO: 119219 - DNA, 26 bp, Homo sapiens
agataacataagcaattgcagcaaaa

SEQ ID NO: 119220 - DNA, 26 bp, Homo sapiens
gataacataagcaattgcagcaaaaa

SEQ ID NO: 119221 - DNA, 26 bp, Homo sapiens
ataacataagcaattgcagcaaaaac

SEQ ID NO: 119222 - DNA, 26 bp, Homo sapiens
taacataagcaattgcagcaaaaaca

SEQ ID NO: 119223 - DNA, 26 bp, Homo sapiens
aacataagcaattgcagcaaaaacaa

SEQ ID NO: 119224 - DNA, 26 bp, Homo sapiens
acataagcaattgcagcaaaaacaaa

SEQ ID NO: 119225 - DNA, 26 bp, Homo sapiens
cataagcaattgcagcaaaaacaaaa

SEQ ID NO: 119226 - DNA, 26 bp, Homo sapiens
ataagcaattgcagcaaaaacaaaaa

SEQ ID NO: 119227 - DNA, 26 bp, Homo sapiens
taagcaattgcagcaaaaacaaaaac

SEQ ID NO: 119228 - DNA, 26 bp, Homo sapiens
aagcaattgcagcaaaaacaaaaact

SEQ ID NO: 119229 - DNA, 26 bp, Homo sapiens
agcaattgcagcaaaaacaaaaactg

SEQ ID NO: 119230 - DNA, 26 bp, Homo sapiens
gcaattgcagcaaaaacaaaaactga

SEQ ID NO: 119231 - DNA, 26 bp, Homo sapiens
caattgcagcaaaaacaaaaactgac

SEQ ID NO: 119232 - DNA, 26 bp, Homo sapiens
aattgcagcaaaaacaaaaactgaca

SEQ ID NO: 119233 - DNA, 26 bp, Homo sapiens
attgcagcaaaaacaaaaactgacaa

SEQ ID NO: 119234 - DNA, 26 bp, Homo sapiens
ttgcagcaaaaacaaaaactgacaaa

SEQ ID NO: 119235 - DNA, 26 bp, Homo sapiens
tgcagcaaaaacaaaaactgacaaag

SEQ ID NO: 119236 - DNA, 26 bp, Homo sapiens
gcagcaaaaacaaaaactgacaaagg

SEQ ID NO: 119237 - DNA, 26 bp, Homo sapiens
cagcaaaaacaaaaactgacaaagga

SEQ ID NO: 119238 - DNA, 26 bp, Homo sapiens
agcaaaaacaaaaactgacaaaggag

SEQ ID NO: 119239 - DNA, 26 bp, Homo sapiens
gcaaaaacaaaaactgacaaaggaga

SEQ ID NO: 119240 - DNA, 26 bp, Homo sapiens
caaaaacaaaaactgacaaaggagat

SEQ ID NO: 119241 - DNA, 26 bp, Homo sapiens
aaaaacaaaaactgacaaaggagatc

SEQ ID NO: 119242 - DNA, 26 bp, Homo sapiens
aaaacaaaaactgacaaaggagatct

SEQ ID NO: 119243 - DNA, 26 bp, Homo sapiens
aaacaaaaactgacaaaggagatcta

SEQ ID NO: 119244 - DNA, 26 bp, Homo sapiens
aacaaaaactgacaaaggagatctaa

SEQ ID NO: 119245 - DNA, 26 bp, Homo sapiens
acaaaaactgacaaaggagatctaat

SEQ ID NO: 119246 - DNA, 26 bp, Homo sapiens
caaaaactgacaaaggagatctaatt

SEQ ID NO: 119247 - DNA, 26 bp, Homo sapiens
aaaaactgacaaaggagatctaatta

SEQ ID NO: 119248 - DNA, 26 bp, Homo sapiens
aaaactgacaaaggagatctaattaa

SEQ ID NO: 119249 - DNA, 26 bp, Homo sapiens
aaactgacaaaggagatctaattaaa

SEQ ID NO: 119250 - DNA, 26 bp, Homo sapiens
aactgacaaaggagatctaattaaat

SEQ ID NO: 119251 - DNA, 26 bp, Homo sapiens
actgacaaaggagatctaattaaatt

SEQ ID NO: 119252 - DNA, 26 bp, Homo sapiens
ctgacaaaggagatctaattaaatta

SEQ ID NO: 119253 - DNA, 26 bp, Homo sapiens
tgacaaaggagatctaattaaattaa

SEQ ID NO: 119254 - DNA, 26 bp, Homo sapiens
gacaaaggagatctaattaaattaaa

SEQ ID NO: 119255 - DNA, 26 bp, Homo sapiens
acaaaggagatctaattaaattaaag

SEQ ID NO: 119256 - DNA, 26 bp, Homo sapiens
caaaggagatctaattaaattaaaga

SEQ ID NO: 119257 - DNA, 26 bp, Homo sapiens
aaaggagatctaattaaattaaagag

SEQ ID NO: 119258 - DNA, 26 bp, Homo sapiens
aaggagatctaattaaattaaagagc

SEQ ID NO: 119259 - DNA, 26 bp, Homo sapiens
aggagatctaattaaattaaagagct

SEQ ID NO: 119260 - DNA, 26 bp, Homo sapiens
ggagatctaattaaattaaagagctt

SEQ ID NO: 119261 - DNA, 26 bp, Homo sapiens
gagatctaattaaattaaagagcttc

SEQ ID NO: 119262 - DNA, 26 bp, Homo sapiens
agatctaattaaattaaagagcttct

SEQ ID NO: 119263 - DNA, 26 bp, Homo sapiens
gatctaattaaattaaagagcttctg

SEQ ID NO: 119264 - DNA, 26 bp, Homo sapiens
atctaattaaattaaagagcttctgc

SEQ ID NO: 119265 - DNA, 26 bp, Homo sapiens
tctaattaaattaaagagcttctgca

SEQ ID NO: 119266 - DNA, 26 bp, Homo sapiens
ctaattaaattaaagagcttctgcac

SEQ ID NO: 119267 - DNA, 26 bp, Homo sapiens
taattaaattaaagagcttctgcaca

SEQ ID NO: 119268 - DNA, 26 bp, Homo sapiens
aattaaattaaagagcttctgcacat

SEQ ID NO: 119269 - DNA, 26 bp, Homo sapiens
attaaattaaagagcttctgcacatc

SEQ ID NO: 119270 - DNA, 26 bp, Homo sapiens
ttaaattaaagagcttctgcacatca

SEQ ID NO: 119271 - DNA, 26 bp, Homo sapiens
taaattaaagagcttctgcacatcaa

SEQ ID NO: 119272 - DNA, 26 bp, Homo sapiens
aaattaaagagcttctgcacatcaaa

SEQ ID NO: 119273 - DNA, 26 bp, Homo sapiens
aattaaagagcttctgcacatcaaaa

SEQ ID NO: 119274 - DNA, 26 bp, Homo sapiens
attaaagagcttctgcacatcaaaag

SEQ ID NO: 119275 - DNA, 26 bp, Homo sapiens
ttaaagagcttctgcacatcaaaaga

SEQ ID NO: 119276 - DNA, 26 bp, Homo sapiens
taaagagcttctgcacatcaaaagaa

SEQ ID NO: 119277 - DNA, 26 bp, Homo sapiens
aaagagcttctgcacatcaaaagaaa

SEQ ID NO: 119278 - DNA, 26 bp, Homo sapiens
aagagcttctgcacatcaaaagaaac

SEQ ID NO: 119279 - DNA, 26 bp, Homo sapiens
agagcttctgcacatcaaaagaaact

SEQ ID NO: 119280 - DNA, 26 bp, Homo sapiens
gagcttctgcacatcaaaagaaacta

SEQ ID NO: 119281 - DNA, 26 bp, Homo sapiens
agcttctgcacatcaaaagaaactat

SEQ ID NO: 119282 - DNA, 26 bp, Homo sapiens
gcttctgcacatcaaaagaaactatt

SEQ ID NO: 119283 - DNA, 26 bp, Homo sapiens
cttctgcacatcaaaagaaactattg

SEQ ID NO: 119284 - DNA, 26 bp, Homo sapiens
ttctgcacatcaaaagaaactattgg

SEQ ID NO: 119285 - DNA, 26 bp, Homo sapiens
tctgcacatcaaaagaaactattggc

SEQ ID NO: 119286 - DNA, 26 bp, Homo sapiens
ctgcacatcaaaagaaactattggcc

SEQ ID NO: 119287 - DNA, 26 bp, Homo sapiens
tgcacatcaaaagaaactattggcca

SEQ ID NO: 119288 - DNA, 26 bp, Homo sapiens
gcacatcaaaagaaactattggccag

SEQ ID NO: 119289 - DNA, 26 bp, Homo sapiens
cacatcaaaagaaactattggccaga

SEQ ID NO: 119290 - DNA, 26 bp, Homo sapiens
acatcaaaagaaactattggccagat

SEQ ID NO: 119291 - DNA, 26 bp, Homo sapiens
catcaaaagaaactattggccagatg

SEQ ID NO: 119292 - DNA, 26 bp, Homo sapiens
atcaaaagaaactattggccagatgt

SEQ ID NO: 119293 - DNA, 26 bp, Homo sapiens
tcaaaagaaactattggccagatgtg

SEQ ID NO: 119294 - DNA, 26 bp, Homo sapiens
caaaagaaactattggccagatgtgg

SEQ ID NO: 119295 - DNA, 26 bp, Homo sapiens
aaaagaaactattggccagatgtggt

SEQ ID NO: 119296 - DNA, 26 bp, Homo sapiens
aaagaaactattggccagatgtggtg

SEQ ID NO: 119297 - DNA, 26 bp, Homo sapiens
aagaaactattggccagatgtggtgg

SEQ ID NO: 119298 - DNA, 26 bp, Homo sapiens
agaaactattggccagatgtggtggc

SEQ ID NO: 119299 - DNA, 26 bp, Homo sapiens
gaaactattggccagatgtggtggct

SEQ ID NO: 119300 - DNA, 26 bp, Homo sapiens
aaactattggccagatgtggtggctc

SEQ ID NO: 119301 - DNA, 26 bp, Homo sapiens
aactattggccagatgtggtggctca

SEQ ID NO: 119302 - DNA, 26 bp, Homo sapiens
actattggccagatgtggtggctcat

SEQ ID NO: 119303 - DNA, 26 bp, Homo sapiens
ctattggccagatgtggtggctcatg

SEQ ID NO: 119304 - DNA, 26 bp, Homo sapiens
tattggccagatgtggtggctcatgc

SEQ ID NO: 119305 - DNA, 26 bp, Homo sapiens
attggccagatgtggtggctcatgcc

SEQ ID NO: 119306 - DNA, 26 bp, Homo sapiens
ttggccagatgtggtggctcatgcct

SEQ ID NO: 119307 - DNA, 26 bp, Homo sapiens
tggccagatgtggtggctcatgccta

SEQ ID NO: 119308 - DNA, 26 bp, Homo sapiens
ggccagatgtggtggctcatgcctaa

SEQ ID NO: 119309 - DNA, 26 bp, Homo sapiens
gccagatgtggtggctcatgcctaaa

SEQ ID NO: 119310 - DNA, 26 bp, Homo sapiens
ccagatgtggtggctcatgcctaaat

SEQ ID NO: 119311 - DNA, 26 bp, Homo sapiens
cagatgtggtggctcatgcctaaatc

SEQ ID NO: 119312 - DNA, 26 bp, Homo sapiens
agatgtggtggctcatgcctaaatcc

SEQ ID NO: 119313 - DNA, 26 bp, Homo sapiens
gatgtggtggctcatgcctaaatccc

SEQ ID NO: 119314 - DNA, 26 bp, Homo sapiens
atgtggtggctcatgcctaaatccca

SEQ ID NO: 119315 - DNA, 26 bp, Homo sapiens
tgtggtggctcatgcctaaatcccag

SEQ ID NO: 119316 - DNA, 26 bp, Homo sapiens
gtggtggctcatgcctaaatcccagt

SEQ ID NO: 119317 - DNA, 26 bp, Homo sapiens
tggtggctcatgcctaaatcccagta

SEQ ID NO: 119318 - DNA, 26 bp, Homo sapiens
ggtggctcatgcctaaatcccagtac

SEQ ID NO: 119319 - DNA, 26 bp, Homo sapiens
gtggctcatgcctaaatcccagtact

SEQ ID NO: 119320 - DNA, 26 bp, Homo sapiens
tggctcatgcctaaatcccagtactt

SEQ ID NO: 119321 - DNA, 26 bp, Homo sapiens
ggctcatgcctaaatcccagtacttt

SEQ ID NO: 119322 - DNA, 26 bp, Homo sapiens
gctcatgcctaaatcccagtactttg

SEQ ID NO: 119323 - DNA, 26 bp, Homo sapiens
ctcatgcctaaatcccagtactttgg

SEQ ID NO: 119324 - DNA, 26 bp, Homo sapiens
tcatgcctaaatcccagtactttggg

SEQ ID NO: 119325 - DNA, 26 bp, Homo sapiens
catgcctaaatcccagtactttggga

SEQ ID NO: 119326 - DNA, 26 bp, Homo sapiens
atgcctaaatcccagtactttgggag

SEQ ID NO: 119327 - DNA, 26 bp, Homo sapiens
tgcctaaatcccagtactttgggagg

SEQ ID NO: 119328 - DNA, 26 bp, Homo sapiens
gcctaaatcccagtactttgggaggc

SEQ ID NO: 119329 - DNA, 26 bp, Homo sapiens
cctaaatcccagtactttgggaggct

SEQ ID NO: 119330 - DNA, 26 bp, Homo sapiens
ctaaatcccagtactttgggaggctg

SEQ ID NO: 119331 - DNA, 26 bp, Homo sapiens
taaatcccagtactttgggaggctga

SEQ ID NO: 119332 - DNA, 26 bp, Homo sapiens
aaatcccagtactttgggaggctgaa

SEQ ID NO: 119333 - DNA, 26 bp, Homo sapiens
aatcccagtactttgggaggctgaag

SEQ ID NO: 119334 - DNA, 26 bp, Homo sapiens
atcccagtactttgggaggctgaagc

SEQ ID NO: 119335 - DNA, 26 bp, Homo sapiens
tcccagtactttgggaggctgaagca

SEQ ID NO: 119336 - DNA, 26 bp, Homo sapiens
cccagtactttgggaggctgaagcag

SEQ ID NO: 119337 - DNA, 26 bp, Homo sapiens
ccagtactttgggaggctgaagcagg

SEQ ID NO: 119338 - DNA, 26 bp, Homo sapiens
cagtactttgggaggctgaagcaggc

SEQ ID NO: 119339 - DNA, 26 bp, Homo sapiens
agtactttgggaggctgaagcaggca

SEQ ID NO: 119340 - DNA, 26 bp, Homo sapiens
gtactttgggaggctgaagcaggcag

SEQ ID NO: 119341 - DNA, 26 bp, Homo sapiens
tactttgggaggctgaagcaggcaga

SEQ ID NO: 119342 - DNA, 26 bp, Homo sapiens
actttgggaggctgaagcaggcagat

SEQ ID NO: 119343 - DNA, 26 bp, Homo sapiens
ctttgggaggctgaagcaggcagatt

SEQ ID NO: 119344 - DNA, 26 bp, Homo sapiens
tttgggaggctgaagcaggcagattg

SEQ ID NO: 119345 - DNA, 26 bp, Homo sapiens
ttgggaggctgaagcaggcagattgc

SEQ ID NO: 119346 - DNA, 26 bp, Homo sapiens
tgggaggctgaagcaggcagattgct

SEQ ID NO: 119347 - DNA, 26 bp, Homo sapiens
gggaggctgaagcaggcagattgctt

SEQ ID NO: 119348 - DNA, 26 bp, Homo sapiens
ggaggctgaagcaggcagattgcttg

SEQ ID NO: 119349 - DNA, 26 bp, Homo sapiens
gaggctgaagcaggcagattgcttga

SEQ ID NO: 119350 - DNA, 26 bp, Homo sapiens
aggctgaagcaggcagattgcttgag

SEQ ID NO: 119351 - DNA, 26 bp, Homo sapiens
ggctgaagcaggcagattgcttgagc

SEQ ID NO: 119352 - DNA, 26 bp, Homo sapiens
gctgaagcaggcagattgcttgagct

SEQ ID NO: 119353 - DNA, 26 bp, Homo sapiens
ctgaagcaggcagattgcttgagctc

SEQ ID NO: 119354 - DNA, 26 bp, Homo sapiens
tgaagcaggcagattgcttgagctca

SEQ ID NO: 119355 - DNA, 26 bp, Homo sapiens
gaagcaggcagattgcttgagctcag

SEQ ID NO: 119356 - DNA, 26 bp, Homo sapiens
aagcaggcagattgcttgagctcagt

SEQ ID NO: 119357 - DNA, 26 bp, Homo sapiens
agcaggcagattgcttgagctcagta

SEQ ID NO: 119358 - DNA, 26 bp, Homo sapiens
gcaggcagattgcttgagctcagtag

SEQ ID NO: 119359 - DNA, 26 bp, Homo sapiens
caggcagattgcttgagctcagtagt

SEQ ID NO: 119360 - DNA, 26 bp, Homo sapiens
aggcagattgcttgagctcagtagtt

SEQ ID NO: 119361 - DNA, 26 bp, Homo sapiens
ggcagattgcttgagctcagtagttc

SEQ ID NO: 119362 - DNA, 26 bp, Homo sapiens
gcagattgcttgagctcagtagttca

SEQ ID NO: 119363 - DNA, 26 bp, Homo sapiens
cagattgcttgagctcagtagttcaa

SEQ ID NO: 119364 - DNA, 26 bp, Homo sapiens
agattgcttgagctcagtagttcaag

SEQ ID NO: 119365 - DNA, 26 bp, Homo sapiens
gattgcttgagctcagtagttcaaga

SEQ ID NO: 119366 - DNA, 26 bp, Homo sapiens
attgcttgagctcagtagttcaagac

SEQ ID NO: 119367 - DNA, 26 bp, Homo sapiens
ttgcttgagctcagtagttcaagacc

SEQ ID NO: 119368 - DNA, 26 bp, Homo sapiens
tgcttgagctcagtagttcaagacca

SEQ ID NO: 119369 - DNA, 26 bp, Homo sapiens
gcttgagctcagtagttcaagaccag

SEQ ID NO: 119370 - DNA, 26 bp, Homo sapiens
cttgagctcagtagttcaagaccagc

SEQ ID NO: 119371 - DNA, 26 bp, Homo sapiens
ttgagctcagtagttcaagaccagct

SEQ ID NO: 119372 - DNA, 26 bp, Homo sapiens
tgagctcagtagttcaagaccagctt

SEQ ID NO: 119373 - DNA, 26 bp, Homo sapiens
gagctcagtagttcaagaccagcttg

SEQ ID NO: 119374 - DNA, 26 bp, Homo sapiens
agctcagtagttcaagaccagcttgg

SEQ ID NO: 119375 - DNA, 26 bp, Homo sapiens
gctcagtagttcaagaccagcttggg

SEQ ID NO: 119376 - DNA, 26 bp, Homo sapiens
ctcagtagttcaagaccagcttgggc

SEQ ID NO: 119377 - DNA, 26 bp, Homo sapiens
tcagtagttcaagaccagcttgggca

SEQ ID NO: 119378 - DNA, 26 bp, Homo sapiens
cagtagttcaagaccagcttgggcaa

SEQ ID NO: 119379 - DNA, 26 bp, Homo sapiens
agtagttcaagaccagcttgggcaac

SEQ ID NO: 119380 - DNA, 26 bp, Homo sapiens
gtagttcaagaccagcttgggcaaca

SEQ ID NO: 119381 - DNA, 26 bp, Homo sapiens
tagttcaagaccagcttgggcaacat

SEQ ID NO: 119382 - DNA, 26 bp, Homo sapiens
agttcaagaccagcttgggcaacatg

SEQ ID NO: 119383 - DNA, 26 bp, Homo sapiens
gttcaagaccagcttgggcaacatgg

SEQ ID NO: 119384 - DNA, 26 bp, Homo sapiens
ttcaagaccagcttgggcaacatgga

SEQ ID NO: 119385 - DNA, 26 bp, Homo sapiens
tcaagaccagcttgggcaacatggaa

SEQ ID NO: 119386 - DNA, 26 bp, Homo sapiens
caagaccagcttgggcaacatggaaa

SEQ ID NO: 119387 - DNA, 26 bp, Homo sapiens
aagaccagcttgggcaacatggaaaa

SEQ ID NO: 119388 - DNA, 26 bp, Homo sapiens
agaccagcttgggcaacatggaaaaa

SEQ ID NO: 119389 - DNA, 26 bp, Homo sapiens
gaccagcttgggcaacatggaaaaac

SEQ ID NO: 119390 - DNA, 26 bp, Homo sapiens
accagcttgggcaacatggaaaaaca

SEQ ID NO: 119391 - DNA, 26 bp, Homo sapiens
ccagcttgggcaacatggaaaaacac

SEQ ID NO: 119392 - DNA, 26 bp, Homo sapiens
cagcttgggcaacatggaaaaacaca

SEQ ID NO: 119393 - DNA, 26 bp, Homo sapiens
agcttgggcaacatggaaaaacacat

SEQ ID NO: 119394 - DNA, 26 bp, Homo sapiens
gcttgggcaacatggaaaaacacatc

SEQ ID NO: 119395 - DNA, 26 bp, Homo sapiens
cttgggcaacatggaaaaacacatct

SEQ ID NO: 119396 - DNA, 26 bp, Homo sapiens
ttgggcaacatggaaaaacacatctc

SEQ ID NO: 119397 - DNA, 26 bp, Homo sapiens
tgggcaacatggaaaaacacatctct

SEQ ID NO: 119398 - DNA, 26 bp, Homo sapiens
gggcaacatggaaaaacacatctcta

SEQ ID NO: 119399 - DNA, 26 bp, Homo sapiens
ggcaacatggaaaaacacatctctac

SEQ ID NO: 119400 - DNA, 26 bp, Homo sapiens
gcaacatggaaaaacacatctctaca

SEQ ID NO: 119401 - DNA, 26 bp, Homo sapiens
caacatggaaaaacacatctctacaa

SEQ ID NO: 119402 - DNA, 26 bp, Homo sapiens
aacatggaaaaacacatctctacaaa

SEQ ID NO: 119403 - DNA, 26 bp, Homo sapiens
acatggaaaaacacatctctacaaac

SEQ ID NO: 119404 - DNA, 26 bp, Homo sapiens
catggaaaaacacatctctacaaaca

SEQ ID NO: 119405 - DNA, 26 bp, Homo sapiens
atggaaaaacacatctctacaaacaa

SEQ ID NO: 119406 - DNA, 26 bp, Homo sapiens
tggaaaaacacatctctacaaacaaa

SEQ ID NO: 119407 - DNA, 26 bp, Homo sapiens
ggaaaaacacatctctacaaacaaat

SEQ ID NO: 119408 - DNA, 26 bp, Homo sapiens
gaaaaacacatctctacaaacaaata

SEQ ID NO: 119409 - DNA, 26 bp, Homo sapiens
aaaaacacatctctacaaacaaatac

SEQ ID NO: 119410 - DNA, 26 bp, Homo sapiens
aaaacacatctctacaaacaaataca

SEQ ID NO: 119411 - DNA, 26 bp, Homo sapiens
aaacacatctctacaaacaaatacaa

SEQ ID NO: 119412 - DNA, 26 bp, Homo sapiens
aacacatctctacaaacaaatacaaa

SEQ ID NO: 119413 - DNA, 26 bp, Homo sapiens
acacatctctacaaacaaatacaaaa

SEQ ID NO: 119414 - DNA, 26 bp, Homo sapiens
cacatctctacaaacaaatacaaaaa

SEQ ID NO: 119415 - DNA, 26 bp, Homo sapiens
acatctctacaaacaaatacaaaaaa

SEQ ID NO: 119416 - DNA, 26 bp, Homo sapiens
catctctacaaacaaatacaaaaaat

SEQ ID NO: 119417 - DNA, 26 bp, Homo sapiens
atctctacaaacaaatacaaaaaatt

SEQ ID NO: 119418 - DNA, 26 bp, Homo sapiens
tctctacaaacaaatacaaaaaatta

SEQ ID NO: 119419 - DNA, 26 bp, Homo sapiens
ctctacaaacaaatacaaaaaattaa

SEQ ID NO: 119420 - DNA, 26 bp, Homo sapiens
tctacaaacaaatacaaaaaattaac

SEQ ID NO: 119421 - DNA, 26 bp, Homo sapiens
ctacaaacaaatacaaaaaattaact

SEQ ID NO: 119422 - DNA, 26 bp, Homo sapiens
tacaaacaaatacaaaaaattaactg

SEQ ID NO: 119423 - DNA, 26 bp, Homo sapiens
acaaacaaatacaaaaaattaactgg

SEQ ID NO: 119424 - DNA, 26 bp, Homo sapiens
caaacaaatacaaaaaattaactggt

SEQ ID NO: 119425 - DNA, 26 bp, Homo sapiens
aaacaaatacaaaaaattaactggtc

SEQ ID NO: 119426 - DNA, 26 bp, Homo sapiens
aacaaatacaaaaaattaactggtct

SEQ ID NO: 119427 - DNA, 26 bp, Homo sapiens
acaaatacaaaaaattaactggtctt

SEQ ID NO: 119428 - DNA, 26 bp, Homo sapiens
caaatacaaaaaattaactggtcttg

SEQ ID NO: 119429 - DNA, 26 bp, Homo sapiens
aaatacaaaaaattaactggtcttgg

SEQ ID NO: 119430 - DNA, 26 bp, Homo sapiens
aatacaaaaaattaactggtcttggg

SEQ ID NO: 119431 - DNA, 26 bp, Homo sapiens
atacaaaaaattaactggtcttgggt

SEQ ID NO: 119432 - DNA, 26 bp, Homo sapiens
tacaaaaaattaactggtcttgggtg

SEQ ID NO: 119433 - DNA, 26 bp, Homo sapiens
acaaaaaattaactggtcttgggtgt

SEQ ID NO: 119434 - DNA, 26 bp, Homo sapiens
caaaaaattaactggtcttgggtgta

SEQ ID NO: 119435 - DNA, 26 bp, Homo sapiens
aaaaaattaactggtcttgggtgtaa

SEQ ID NO: 119436 - DNA, 26 bp, Homo sapiens
aaaaattaactggtcttgggtgtaag

SEQ ID NO: 119437 - DNA, 26 bp, Homo sapiens
aaaattaactggtcttgggtgtaagc

SEQ ID NO: 119438 - DNA, 26 bp, Homo sapiens
aaattaactggtcttgggtgtaagca

SEQ ID NO: 119439 - DNA, 26 bp, Homo sapiens
aattaactggtcttgggtgtaagcac

SEQ ID NO: 119440 - DNA, 26 bp, Homo sapiens
attaactggtcttgggtgtaagcacc

SEQ ID NO: 119441 - DNA, 26 bp, Homo sapiens
ttaactggtcttgggtgtaagcacct

SEQ ID NO: 119442 - DNA, 26 bp, Homo sapiens
taactggtcttgggtgtaagcacctg

SEQ ID NO: 119443 - DNA, 26 bp, Homo sapiens
aactggtcttgggtgtaagcacctgt

SEQ ID NO: 119444 - DNA, 26 bp, Homo sapiens
actggtcttgggtgtaagcacctgta

SEQ ID NO: 119445 - DNA, 26 bp, Homo sapiens
ctggtcttgggtgtaagcacctgtag

SEQ ID NO: 119446 - DNA, 26 bp, Homo sapiens
tggtcttgggtgtaagcacctgtagt

SEQ ID NO: 119447 - DNA, 26 bp, Homo sapiens
ggtcttgggtgtaagcacctgtagtc

SEQ ID NO: 119448 - DNA, 26 bp, Homo sapiens
gtcttgggtgtaagcacctgtagtcc

SEQ ID NO: 119449 - DNA, 26 bp, Homo sapiens
tcttgggtgtaagcacctgtagtccc

SEQ ID NO: 119450 - DNA, 26 bp, Homo sapiens
cttgggtgtaagcacctgtagtccca

SEQ ID NO: 119451 - DNA, 26 bp, Homo sapiens
ttgggtgtaagcacctgtagtcccag

SEQ ID NO: 119452 - DNA, 26 bp, Homo sapiens
tgggtgtaagcacctgtagtcccagc

SEQ ID NO: 119453 - DNA, 26 bp, Homo sapiens
gggtgtaagcacctgtagtcccagct

SEQ ID NO: 119454 - DNA, 26 bp, Homo sapiens
ggtgtaagcacctgtagtcccagcta

SEQ ID NO: 119455 - DNA, 26 bp, Homo sapiens
gtgtaagcacctgtagtcccagctat

SEQ ID NO: 119456 - DNA, 26 bp, Homo sapiens
tgtaagcacctgtagtcccagctatg

SEQ ID NO: 119457 - DNA, 26 bp, Homo sapiens
gtaagcacctgtagtcccagctatgt

SEQ ID NO: 119458 - DNA, 26 bp, Homo sapiens
taagcacctgtagtcccagctatgtg

SEQ ID NO: 119459 - DNA, 26 bp, Homo sapiens
aagcacctgtagtcccagctatgtgg

SEQ ID NO: 119460 - DNA, 26 bp, Homo sapiens
agcacctgtagtcccagctatgtggg

SEQ ID NO: 119461 - DNA, 26 bp, Homo sapiens
gcacctgtagtcccagctatgtgggg

SEQ ID NO: 119462 - DNA, 26 bp, Homo sapiens
cacctgtagtcccagctatgtggggg

SEQ ID NO: 119463 - DNA, 26 bp, Homo sapiens
acctgtagtcccagctatgtgggggg

SEQ ID NO: 119464 - DNA, 26 bp, Homo sapiens
cctgtagtcccagctatgtggggggt

SEQ ID NO: 119465 - DNA, 26 bp, Homo sapiens
ctgtagtcccagctatgtggggggtt

SEQ ID NO: 119466 - DNA, 26 bp, Homo sapiens
tgtagtcccagctatgtggggggttg

SEQ ID NO: 119467 - DNA, 26 bp, Homo sapiens
gtagtcccagctatgtggggggttga

SEQ ID NO: 119468 - DNA, 26 bp, Homo sapiens
tagtcccagctatgtggggggttgag

SEQ ID NO: 119469 - DNA, 26 bp, Homo sapiens
agtcccagctatgtggggggttgagg

SEQ ID NO: 119470 - DNA, 26 bp, Homo sapiens
gtcccagctatgtggggggttgaggt

SEQ ID NO: 119471 - DNA, 26 bp, Homo sapiens
tcccagctatgtggggggttgaggtg

SEQ ID NO: 119472 - DNA, 26 bp, Homo sapiens
cccagctatgtggggggttgaggtga

SEQ ID NO: 119473 - DNA, 26 bp, Homo sapiens
ccagctatgtggggggttgaggtgaa

SEQ ID NO: 119474 - DNA, 26 bp, Homo sapiens
cagctatgtggggggttgaggtgaaa

SEQ ID NO: 119475 - DNA, 26 bp, Homo sapiens
agctatgtggggggttgaggtgaaag

SEQ ID NO: 119476 - DNA, 26 bp, Homo sapiens
gctatgtggggggttgaggtgaaagg

SEQ ID NO: 119477 - DNA, 26 bp, Homo sapiens
ctatgtggggggttgaggtgaaagga

SEQ ID NO: 119478 - DNA, 26 bp, Homo sapiens
tatgtggggggttgaggtgaaaggac

SEQ ID NO: 119479 - DNA, 26 bp, Homo sapiens
atgtggggggttgaggtgaaaggact

SEQ ID NO: 119480 - DNA, 26 bp, Homo sapiens
tgtggggggttgaggtgaaaggactg

SEQ ID NO: 119481 - DNA, 26 bp, Homo sapiens
gtggggggttgaggtgaaaggactgc

SEQ ID NO: 119482 - DNA, 26 bp, Homo sapiens
tggggggttgaggtgaaaggactgct

SEQ ID NO: 119483 - DNA, 26 bp, Homo sapiens
ggggggttgaggtgaaaggactgctt

SEQ ID NO: 119484 - DNA, 26 bp, Homo sapiens
gggggttgaggtgaaaggactgcttg

SEQ ID NO: 119485 - DNA, 26 bp, Homo sapiens
ggggttgaggtgaaaggactgcttga

SEQ ID NO: 119486 - DNA, 26 bp, Homo sapiens
gggttgaggtgaaaggactgcttgag

SEQ ID NO: 119487 - DNA, 26 bp, Homo sapiens
ggttgaggtgaaaggactgcttgagc

SEQ ID NO: 119488 - DNA, 26 bp, Homo sapiens
gttgaggtgaaaggactgcttgagcc

SEQ ID NO: 119489 - DNA, 26 bp, Homo sapiens
ttgaggtgaaaggactgcttgagcct

SEQ ID NO: 119490 - DNA, 26 bp, Homo sapiens
tgaggtgaaaggactgcttgagcctg

SEQ ID NO: 119491 - DNA, 26 bp, Homo sapiens
gaggtgaaaggactgcttgagcctgg

SEQ ID NO: 119492 - DNA, 26 bp, Homo sapiens
aggtgaaaggactgcttgagcctggg

SEQ ID NO: 119493 - DNA, 26 bp, Homo sapiens
ggtgaaaggactgcttgagcctggga

SEQ ID NO: 119494 - DNA, 26 bp, Homo sapiens
gtgaaaggactgcttgagcctgggag

SEQ ID NO: 119495 - DNA, 26 bp, Homo sapiens
tgaaaggactgcttgagcctgggagg

SEQ ID NO: 119496 - DNA, 26 bp, Homo sapiens
gaaaggactgcttgagcctgggaggt

SEQ ID NO: 119497 - DNA, 26 bp, Homo sapiens
aaaggactgcttgagcctgggaggtt

SEQ ID NO: 119498 - DNA, 26 bp, Homo sapiens
aaggactgcttgagcctgggaggttg

SEQ ID NO: 119499 - DNA, 26 bp, Homo sapiens
aggactgcttgagcctgggaggttga

SEQ ID NO: 119500 - DNA, 26 bp, Homo sapiens
ggactgcttgagcctgggaggttgag

SEQ ID NO: 119501 - DNA, 26 bp, Homo sapiens
gactgcttgagcctgggaggttgagg

SEQ ID NO: 119502 - DNA, 26 bp, Homo sapiens
actgcttgagcctgggaggttgaggc

SEQ ID NO: 119503 - DNA, 26 bp, Homo sapiens
ctgcttgagcctgggaggttgaggct

SEQ ID NO: 119504 - DNA, 26 bp, Homo sapiens
tgcttgagcctgggaggttgaggcta

SEQ ID NO: 119505 - DNA, 26 bp, Homo sapiens
gcttgagcctgggaggttgaggctac

SEQ ID NO: 119506 - DNA, 26 bp, Homo sapiens
cttgagcctgggaggttgaggctaca

SEQ ID NO: 119507 - DNA, 26 bp, Homo sapiens
ttgagcctgggaggttgaggctacaa

SEQ ID NO: 119508 - DNA, 26 bp, Homo sapiens
tgagcctgggaggttgaggctacaat

SEQ ID NO: 119509 - DNA, 26 bp, Homo sapiens
gagcctgggaggttgaggctacaatg

SEQ ID NO: 119510 - DNA, 26 bp, Homo sapiens
agcctgggaggttgaggctacaatga

SEQ ID NO: 119511 - DNA, 26 bp, Homo sapiens
gcctgggaggttgaggctacaatgac

SEQ ID NO: 119512 - DNA, 26 bp, Homo sapiens
cctgggaggttgaggctacaatgacc

SEQ ID NO: 119513 - DNA, 26 bp, Homo sapiens
ctgggaggttgaggctacaatgaccc

SEQ ID NO: 119514 - DNA, 26 bp, Homo sapiens
tgggaggttgaggctacaatgaccca

SEQ ID NO: 119515 - DNA, 26 bp, Homo sapiens
gggaggttgaggctacaatgacccat

SEQ ID NO: 119516 - DNA, 26 bp, Homo sapiens
ggaggttgaggctacaatgacccatg

SEQ ID NO: 119517 - DNA, 26 bp, Homo sapiens
gaggttgaggctacaatgacccatgt

SEQ ID NO: 119518 - DNA, 26 bp, Homo sapiens
aggttgaggctacaatgacccatgtt

SEQ ID NO: 119519 - DNA, 26 bp, Homo sapiens
ggttgaggctacaatgacccatgttt

SEQ ID NO: 119520 - DNA, 26 bp, Homo sapiens
gttgaggctacaatgacccatgtttg

SEQ ID NO: 119521 - DNA, 26 bp, Homo sapiens
ttgaggctacaatgacccatgtttgt

SEQ ID NO: 119522 - DNA, 26 bp, Homo sapiens
tgaggctacaatgacccatgtttgtg

SEQ ID NO: 119523 - DNA, 26 bp, Homo sapiens
gaggctacaatgacccatgtttgtgc

SEQ ID NO: 119524 - DNA, 26 bp, Homo sapiens
aggctacaatgacccatgtttgtgct

SEQ ID NO: 119525 - DNA, 26 bp, Homo sapiens
ggctacaatgacccatgtttgtgcta

SEQ ID NO: 119526 - DNA, 26 bp, Homo sapiens
gctacaatgacccatgtttgtgctac

SEQ ID NO: 119527 - DNA, 26 bp, Homo sapiens
ctacaatgacccatgtttgtgctact

SEQ ID NO: 119528 - DNA, 26 bp, Homo sapiens
tacaatgacccatgtttgtgctactg

SEQ ID NO: 119529 - DNA, 26 bp, Homo sapiens
acaatgacccatgtttgtgctactgc

SEQ ID NO: 119530 - DNA, 26 bp, Homo sapiens
caatgacccatgtttgtgctactgca

SEQ ID NO: 119531 - DNA, 26 bp, Homo sapiens
aatgacccatgtttgtgctactgcac

SEQ ID NO: 119532 - DNA, 26 bp, Homo sapiens
atgacccatgtttgtgctactgcact

SEQ ID NO: 119533 - DNA, 26 bp, Homo sapiens
tgacccatgtttgtgctactgcactc

SEQ ID NO: 119534 - DNA, 26 bp, Homo sapiens
gacccatgtttgtgctactgcactcc

SEQ ID NO: 119535 - DNA, 26 bp, Homo sapiens
acccatgtttgtgctactgcactcca

SEQ ID NO: 119536 - DNA, 26 bp, Homo sapiens
cccatgtttgtgctactgcactccag

SEQ ID NO: 119537 - DNA, 26 bp, Homo sapiens
ccatgtttgtgctactgcactccagc

SEQ ID NO: 119538 - DNA, 26 bp, Homo sapiens
catgtttgtgctactgcactccagcc

SEQ ID NO: 119539 - DNA, 26 bp, Homo sapiens
atgtttgtgctactgcactccagcct

SEQ ID NO: 119540 - DNA, 26 bp, Homo sapiens
tgtttgtgctactgcactccagcctg

SEQ ID NO: 119541 - DNA, 26 bp, Homo sapiens
gtttgtgctactgcactccagcctgg

SEQ ID NO: 119542 - DNA, 26 bp, Homo sapiens
tttgtgctactgcactccagcctggg

SEQ ID NO: 119543 - DNA, 26 bp, Homo sapiens
ttgtgctactgcactccagcctgggt

SEQ ID NO: 119544 - DNA, 26 bp, Homo sapiens
tgtgctactgcactccagcctgggtg

SEQ ID NO: 119545 - DNA, 26 bp, Homo sapiens
gtgctactgcactccagcctgggtgt

SEQ ID NO: 119546 - DNA, 26 bp, Homo sapiens
tgctactgcactccagcctgggtgtc

SEQ ID NO: 119547 - DNA, 26 bp, Homo sapiens
gctactgcactccagcctgggtgtca

SEQ ID NO: 119548 - DNA, 26 bp, Homo sapiens
ctactgcactccagcctgggtgtcaa

SEQ ID NO: 119549 - DNA, 26 bp, Homo sapiens
tactgcactccagcctgggtgtcaaa

SEQ ID NO: 119550 - DNA, 26 bp, Homo sapiens
actgcactccagcctgggtgtcaaag

SEQ ID NO: 119551 - DNA, 26 bp, Homo sapiens
ctgcactccagcctgggtgtcaaagt

SEQ ID NO: 119552 - DNA, 26 bp, Homo sapiens
tgcactccagcctgggtgtcaaagtg

SEQ ID NO: 119553 - DNA, 26 bp, Homo sapiens
gcactccagcctgggtgtcaaagtga

SEQ ID NO: 119554 - DNA, 26 bp, Homo sapiens
cactccagcctgggtgtcaaagtgag

SEQ ID NO: 119555 - DNA, 26 bp, Homo sapiens
actccagcctgggtgtcaaagtgaga

SEQ ID NO: 119556 - DNA, 26 bp, Homo sapiens
ctccagcctgggtgtcaaagtgagac

SEQ ID NO: 119557 - DNA, 26 bp, Homo sapiens
tccagcctgggtgtcaaagtgagacc

SEQ ID NO: 119558 - DNA, 26 bp, Homo sapiens
ccagcctgggtgtcaaagtgagaccc

SEQ ID NO: 119559 - DNA, 26 bp, Homo sapiens
cagcctgggtgtcaaagtgagaccct

SEQ ID NO: 119560 - DNA, 26 bp, Homo sapiens
agcctgggtgtcaaagtgagaccctg

SEQ ID NO: 119561 - DNA, 26 bp, Homo sapiens
gcctgggtgtcaaagtgagaccctgt

SEQ ID NO: 119562 - DNA, 26 bp, Homo sapiens
cctgggtgtcaaagtgagaccctgtt

SEQ ID NO: 119563 - DNA, 26 bp, Homo sapiens
ctgggtgtcaaagtgagaccctgttt

SEQ ID NO: 119564 - DNA, 26 bp, Homo sapiens
tgggtgtcaaagtgagaccctgtttc

SEQ ID NO: 119565 - DNA, 26 bp, Homo sapiens
gggtgtcaaagtgagaccctgtttca

SEQ ID NO: 119566 - DNA, 26 bp, Homo sapiens
ggtgtcaaagtgagaccctgtttcaa

SEQ ID NO: 119567 - DNA, 26 bp, Homo sapiens
gtgtcaaagtgagaccctgtttcaaa

SEQ ID NO: 119568 - DNA, 26 bp, Homo sapiens
tgtcaaagtgagaccctgtttcaaaa

SEQ ID NO: 119569 - DNA, 26 bp, Homo sapiens
gtcaaagtgagaccctgtttcaaaaa

SEQ ID NO: 119570 - DNA, 26 bp, Homo sapiens
tcaaagtgagaccctgtttcaaaaaa

SEQ ID NO: 119571 - DNA, 26 bp, Homo sapiens
caaagtgagaccctgtttcaaaaaac

SEQ ID NO: 119572 - DNA, 26 bp, Homo sapiens
aaagtgagaccctgtttcaaaaaaca

SEQ ID NO: 119573 - DNA, 26 bp, Homo sapiens
aagtgagaccctgtttcaaaaaacaa

SEQ ID NO: 119574 - DNA, 26 bp, Homo sapiens
agtgagaccctgtttcaaaaaacaaa

SEQ ID NO: 119575 - DNA, 26 bp, Homo sapiens
gtgagaccctgtttcaaaaaacaaaa

SEQ ID NO: 119576 - DNA, 26 bp, Homo sapiens
tgagaccctgtttcaaaaaacaaaaa

SEQ ID NO: 119577 - DNA, 26 bp, Homo sapiens
gagaccctgtttcaaaaaacaaaaac

SEQ ID NO: 119578 - DNA, 26 bp, Homo sapiens
agaccctgtttcaaaaaacaaaaaca

SEQ ID NO: 119579 - DNA, 26 bp, Homo sapiens
gaccctgtttcaaaaaacaaaaacaa

SEQ ID NO: 119580 - DNA, 26 bp, Homo sapiens
accctgtttcaaaaaacaaaaacaaa

SEQ ID NO: 119581 - DNA, 26 bp, Homo sapiens
ccctgtttcaaaaaacaaaaacaaaa

SEQ ID NO: 119582 - DNA, 26 bp, Homo sapiens
cctgtttcaaaaaacaaaaacaaaac

SEQ ID NO: 119583 - DNA, 26 bp, Homo sapiens
ctgtttcaaaaaacaaaaacaaaaca

SEQ ID NO: 119584 - DNA, 26 bp, Homo sapiens
tgtttcaaaaaacaaaaacaaaacaa

SEQ ID NO: 119585 - DNA, 26 bp, Homo sapiens
gtttcaaaaaacaaaaacaaaacaaa

SEQ ID NO: 119586 - DNA, 26 bp, Homo sapiens
tttcaaaaaacaaaaacaaaacaaaa

SEQ ID NO: 119587 - DNA, 26 bp, Homo sapiens
ttcaaaaaacaaaaacaaaacaaaat

SEQ ID NO: 119588 - DNA, 26 bp, Homo sapiens
tcaaaaaacaaaaacaaaacaaaatg

SEQ ID NO: 119589 - DNA, 26 bp, Homo sapiens
caaaaaacaaaaacaaaacaaaatga

SEQ ID NO: 119590 - DNA, 26 bp, Homo sapiens
aaaaaacaaaaacaaaacaaaatgaa

SEQ ID NO: 119591 - DNA, 26 bp, Homo sapiens
aaaaacaaaaacaaaacaaaatgaaa

SEQ ID NO: 119592 - DNA, 26 bp, Homo sapiens
aaaacaaaaacaaaacaaaatgaaac

SEQ ID NO: 119593 - DNA, 26 bp, Homo sapiens
aaacaaaaacaaaacaaaatgaaaca

SEQ ID NO: 119594 - DNA, 26 bp, Homo sapiens
aacaaaaacaaaacaaaatgaaacaa

SEQ ID NO: 119595 - DNA, 26 bp, Homo sapiens
acaaaaacaaaacaaaatgaaacaat

SEQ ID NO: 119596 - DNA, 26 bp, Homo sapiens
caaaaacaaaacaaaatgaaacaatt

SEQ ID NO: 119597 - DNA, 26 bp, Homo sapiens
aaaaacaaaacaaaatgaaacaatta

SEQ ID NO: 119598 - DNA, 26 bp, Homo sapiens
aaaacaaaacaaaatgaaacaattaa

SEQ ID NO: 119599 - DNA, 26 bp, Homo sapiens
aaacaaaacaaaatgaaacaattaac

SEQ ID NO: 119600 - DNA, 26 bp, Homo sapiens
aacaaaacaaaatgaaacaattaaca

SEQ ID NO: 119601 - DNA, 26 bp, Homo sapiens
acaaaacaaaatgaaacaattaacaa

SEQ ID NO: 119602 - DNA, 26 bp, Homo sapiens
caaaacaaaatgaaacaattaacaaa

SEQ ID NO: 119603 - DNA, 26 bp, Homo sapiens
aaaacaaaatgaaacaattaacaaag

SEQ ID NO: 119604 - DNA, 26 bp, Homo sapiens
aaacaaaatgaaacaattaacaaagt

SEQ ID NO: 119605 - DNA, 26 bp, Homo sapiens
aacaaaatgaaacaattaacaaagta

SEQ ID NO: 119606 - DNA, 26 bp, Homo sapiens
acaaaatgaaacaattaacaaagtaa

SEQ ID NO: 119607 - DNA, 26 bp, Homo sapiens
caaaatgaaacaattaacaaagtaac

SEQ ID NO: 119608 - DNA, 26 bp, Homo sapiens
aaaatgaaacaattaacaaagtaaca

SEQ ID NO: 119609 - DNA, 26 bp, Homo sapiens
aaatgaaacaattaacaaagtaacag

SEQ ID NO: 119610 - DNA, 26 bp, Homo sapiens
aatgaaacaattaacaaagtaacaga

SEQ ID NO: 119611 - DNA, 26 bp, Homo sapiens
atgaaacaattaacaaagtaacagac

SEQ ID NO: 119612 - DNA, 26 bp, Homo sapiens
tgaaacaattaacaaagtaacagaca

SEQ ID NO: 119613 - DNA, 26 bp, Homo sapiens
gaaacaattaacaaagtaacagacaa

SEQ ID NO: 119614 - DNA, 26 bp, Homo sapiens
aaacaattaacaaagtaacagacaac

SEQ ID NO: 119615 - DNA, 26 bp, Homo sapiens
aacaattaacaaagtaacagacaacc

SEQ ID NO: 119616 - DNA, 26 bp, Homo sapiens
acaattaacaaagtaacagacaacct

SEQ ID NO: 119617 - DNA, 26 bp, Homo sapiens
caattaacaaagtaacagacaaccta

SEQ ID NO: 119618 - DNA, 26 bp, Homo sapiens
aattaacaaagtaacagacaacctac

SEQ ID NO: 119619 - DNA, 26 bp, Homo sapiens
attaacaaagtaacagacaacctaca

SEQ ID NO: 119620 - DNA, 26 bp, Homo sapiens
ttaacaaagtaacagacaacctacag

SEQ ID NO: 119621 - DNA, 26 bp, Homo sapiens
taacaaagtaacagacaacctacaga

SEQ ID NO: 119622 - DNA, 26 bp, Homo sapiens
aacaaagtaacagacaacctacagaa

SEQ ID NO: 119623 - DNA, 26 bp, Homo sapiens
acaaagtaacagacaacctacagaat

SEQ ID NO: 119624 - DNA, 26 bp, Homo sapiens
caaagtaacagacaacctacagaatg

SEQ ID NO: 119625 - DNA, 26 bp, Homo sapiens
aaagtaacagacaacctacagaatgg

SEQ ID NO: 119626 - DNA, 26 bp, Homo sapiens
aagtaacagacaacctacagaatggt

SEQ ID NO: 119627 - DNA, 26 bp, Homo sapiens
agtaacagacaacctacagaatggta

SEQ ID NO: 119628 - DNA, 26 bp, Homo sapiens
gtaacagacaacctacagaatggtag

SEQ ID NO: 119629 - DNA, 26 bp, Homo sapiens
taacagacaacctacagaatggtaga

SEQ ID NO: 119630 - DNA, 26 bp, Homo sapiens
aacagacaacctacagaatggtagaa

SEQ ID NO: 119631 - DNA, 26 bp, Homo sapiens
acagacaacctacagaatggtagaaa

SEQ ID NO: 119632 - DNA, 26 bp, Homo sapiens
cagacaacctacagaatggtagaaaa

SEQ ID NO: 119633 - DNA, 26 bp, Homo sapiens
agacaacctacagaatggtagaaaat

SEQ ID NO: 119634 - DNA, 26 bp, Homo sapiens
gacaacctacagaatggtagaaaata

SEQ ID NO: 119635 - DNA, 26 bp, Homo sapiens
acaacctacagaatggtagaaaatat

SEQ ID NO: 119636 - DNA, 26 bp, Homo sapiens
caacctacagaatggtagaaaatatt

SEQ ID NO: 119637 - DNA, 26 bp, Homo sapiens
aacctacagaatggtagaaaatattt

SEQ ID NO: 119638 - DNA, 26 bp, Homo sapiens
acctacagaatggtagaaaatatttg

SEQ ID NO: 119639 - DNA, 26 bp, Homo sapiens
cctacagaatggtagaaaatatttgc

SEQ ID NO: 119640 - DNA, 26 bp, Homo sapiens
ctacagaatggtagaaaatatttgcc

SEQ ID NO: 119641 - DNA, 26 bp, Homo sapiens
tacagaatggtagaaaatatttgcca

SEQ ID NO: 119642 - DNA, 26 bp, Homo sapiens
acagaatggtagaaaatatttgccaa

SEQ ID NO: 119643 - DNA, 26 bp, Homo sapiens
cagaatggtagaaaatatttgccaac

SEQ ID NO: 119644 - DNA, 26 bp, Homo sapiens
agaatggtagaaaatatttgccaact

SEQ ID NO: 119645 - DNA, 26 bp, Homo sapiens
gaatggtagaaaatatttgccaacta

SEQ ID NO: 119646 - DNA, 26 bp, Homo sapiens
aatggtagaaaatatttgccaactat

SEQ ID NO: 119647 - DNA, 26 bp, Homo sapiens
atggtagaaaatatttgccaactatg

SEQ ID NO: 119648 - DNA, 26 bp, Homo sapiens
tggtagaaaatatttgccaactatgc

SEQ ID NO: 119649 - DNA, 26 bp, Homo sapiens
ggtagaaaatatttgccaactatgca

SEQ ID NO: 119650 - DNA, 26 bp, Homo sapiens
gtagaaaatatttgccaactatgcat

SEQ ID NO: 119651 - DNA, 26 bp, Homo sapiens
tagaaaatatttgccaactatgcatc

SEQ ID NO: 119652 - DNA, 26 bp, Homo sapiens
agaaaatatttgccaactatgcatcc

SEQ ID NO: 119653 - DNA, 26 bp, Homo sapiens
gaaaatatttgccaactatgcatcca

SEQ ID NO: 119654 - DNA, 26 bp, Homo sapiens
aaaatatttgccaactatgcatccaa

SEQ ID NO: 119655 - DNA, 26 bp, Homo sapiens
aaatatttgccaactatgcatccaac

SEQ ID NO: 119656 - DNA, 26 bp, Homo sapiens
aatatttgccaactatgcatccaaca

SEQ ID NO: 119657 - DNA, 26 bp, Homo sapiens
atatttgccaactatgcatccaacaa

SEQ ID NO: 119658 - DNA, 26 bp, Homo sapiens
tatttgccaactatgcatccaacaaa

SEQ ID NO: 119659 - DNA, 26 bp, Homo sapiens
atttgccaactatgcatccaacaaag

SEQ ID NO: 119660 - DNA, 26 bp, Homo sapiens
tttgccaactatgcatccaacaaaga

SEQ ID NO: 119661 - DNA, 26 bp, Homo sapiens
ttgccaactatgcatccaacaaagat

SEQ ID NO: 119662 - DNA, 26 bp, Homo sapiens
tgccaactatgcatccaacaaagatc

SEQ ID NO: 119663 - DNA, 26 bp, Homo sapiens
gccaactatgcatccaacaaagatct

SEQ ID NO: 119664 - DNA, 26 bp, Homo sapiens
ccaactatgcatccaacaaagatcta

SEQ ID NO: 119665 - DNA, 26 bp, Homo sapiens
caactatgcatccaacaaagatctaa

SEQ ID NO: 119666 - DNA, 26 bp, Homo sapiens
aactatgcatccaacaaagatctaat

SEQ ID NO: 119667 - DNA, 26 bp, Homo sapiens
actatgcatccaacaaagatctaata

SEQ ID NO: 119668 - DNA, 26 bp, Homo sapiens
ctatgcatccaacaaagatctaatat

SEQ ID NO: 119669 - DNA, 26 bp, Homo sapiens
tatgcatccaacaaagatctaatatc

SEQ ID NO: 119670 - DNA, 26 bp, Homo sapiens
atgcatccaacaaagatctaatatcc

SEQ ID NO: 119671 - DNA, 26 bp, Homo sapiens
tgcatccaacaaagatctaatatcca

SEQ ID NO: 119672 - DNA, 26 bp, Homo sapiens
gcatccaacaaagatctaatatccag

SEQ ID NO: 119673 - DNA, 26 bp, Homo sapiens
catccaacaaagatctaatatccaga

SEQ ID NO: 119674 - DNA, 26 bp, Homo sapiens
atccaacaaagatctaatatccagaa

SEQ ID NO: 119675 - DNA, 26 bp, Homo sapiens
tccaacaaagatctaatatccagaat

SEQ ID NO: 119676 - DNA, 26 bp, Homo sapiens
ccaacaaagatctaatatccagaatc

SEQ ID NO: 119677 - DNA, 26 bp, Homo sapiens
caacaaagatctaatatccagaatct

SEQ ID NO: 119678 - DNA, 26 bp, Homo sapiens
aacaaagatctaatatccagaatcta

SEQ ID NO: 119679 - DNA, 26 bp, Homo sapiens
acaaagatctaatatccagaatctat

SEQ ID NO: 119680 - DNA, 26 bp, Homo sapiens
caaagatctaatatccagaatctata

SEQ ID NO: 119681 - DNA, 26 bp, Homo sapiens
aaagatctaatatccagaatctataa

SEQ ID NO: 119682 - DNA, 26 bp, Homo sapiens
aagatctaatatccagaatctataag

SEQ ID NO: 119683 - DNA, 26 bp, Homo sapiens
agatctaatatccagaatctataaga

SEQ ID NO: 119684 - DNA, 26 bp, Homo sapiens
gatctaatatccagaatctataagaa

SEQ ID NO: 119685 - DNA, 26 bp, Homo sapiens
atctaatatccagaatctataagaag

SEQ ID NO: 119686 - DNA, 26 bp, Homo sapiens
tctaatatccagaatctataagaagc

SEQ ID NO: 119687 - DNA, 26 bp, Homo sapiens
ctaatatccagaatctataagaagct

SEQ ID NO: 119688 - DNA, 26 bp, Homo sapiens
taatatccagaatctataagaagctt

SEQ ID NO: 119689 - DNA, 26 bp, Homo sapiens
aatatccagaatctataagaagcttc

SEQ ID NO: 119690 - DNA, 26 bp, Homo sapiens
atatccagaatctataagaagcttca

SEQ ID NO: 119691 - DNA, 26 bp, Homo sapiens
tatccagaatctataagaagcttcaa

SEQ ID NO: 119692 - DNA, 26 bp, Homo sapiens
atccagaatctataagaagcttcaaa

SEQ ID NO: 119693 - DNA, 26 bp, Homo sapiens
tccagaatctataagaagcttcaaaa

SEQ ID NO: 119694 - DNA, 26 bp, Homo sapiens
ccagaatctataagaagcttcaaaaa

SEQ ID NO: 119695 - DNA, 26 bp, Homo sapiens
cagaatctataagaagcttcaaaaaa

SEQ ID NO: 119696 - DNA, 26 bp, Homo sapiens
agaatctataagaagcttcaaaaaat

SEQ ID NO: 119697 - DNA, 26 bp, Homo sapiens
gaatctataagaagcttcaaaaaatt

SEQ ID NO: 119698 - DNA, 26 bp, Homo sapiens
aatctataagaagcttcaaaaaattt

SEQ ID NO: 119699 - DNA, 26 bp, Homo sapiens
atctataagaagcttcaaaaaattta

SEQ ID NO: 119700 - DNA, 26 bp, Homo sapiens
tctataagaagcttcaaaaaatttac

SEQ ID NO: 119701 - DNA, 26 bp, Homo sapiens
ctataagaagcttcaaaaaatttaca

SEQ ID NO: 119702 - DNA, 26 bp, Homo sapiens
tataagaagcttcaaaaaatttacaa

SEQ ID NO: 119703 - DNA, 26 bp, Homo sapiens
ataagaagcttcaaaaaatttacaag

SEQ ID NO: 119704 - DNA, 26 bp, Homo sapiens
taagaagcttcaaaaaatttacaagc

SEQ ID NO: 119705 - DNA, 26 bp, Homo sapiens
aagaagcttcaaaaaatttacaagcg

SEQ ID NO: 119706 - DNA, 26 bp, Homo sapiens
agaagcttcaaaaaatttacaagcga

SEQ ID NO: 119707 - DNA, 26 bp, Homo sapiens
gaagcttcaaaaaatttacaagcgaa

SEQ ID NO: 119708 - DNA, 26 bp, Homo sapiens
aagcttcaaaaaatttacaagcgaaa

SEQ ID NO: 119709 - DNA, 26 bp, Homo sapiens
agcttcaaaaaatttacaagcgaaaa

SEQ ID NO: 119710 - DNA, 26 bp, Homo sapiens
gcttcaaaaaatttacaagcgaaaaa

SEQ ID NO: 119711 - DNA, 26 bp, Homo sapiens
cttcaaaaaatttacaagcgaaaaac

SEQ ID NO: 119712 - DNA, 26 bp, Homo sapiens
ttcaaaaaatttacaagcgaaaaaca

SEQ ID NO: 119713 - DNA, 26 bp, Homo sapiens
tcaaaaaatttacaagcgaaaaacaa

SEQ ID NO: 119714 - DNA, 26 bp, Homo sapiens
caaaaaatttacaagcgaaaaacaag

SEQ ID NO: 119715 - DNA, 26 bp, Homo sapiens
aaaaaatttacaagcgaaaaacaagc

SEQ ID NO: 119716 - DNA, 26 bp, Homo sapiens
aaaaatttacaagcgaaaaacaagca

SEQ ID NO: 119717 - DNA, 26 bp, Homo sapiens
aaaatttacaagcgaaaaacaagcaa

SEQ ID NO: 119718 - DNA, 26 bp, Homo sapiens
aaatttacaagcgaaaaacaagcaac

SEQ ID NO: 119719 - DNA, 26 bp, Homo sapiens
aatttacaagcgaaaaacaagcaacc

SEQ ID NO: 119720 - DNA, 26 bp, Homo sapiens
atttacaagcgaaaaacaagcaaccc

SEQ ID NO: 119721 - DNA, 26 bp, Homo sapiens
tttacaagcgaaaaacaagcaacccc

SEQ ID NO: 119722 - DNA, 26 bp, Homo sapiens
ttacaagcgaaaaacaagcaacccca

SEQ ID NO: 119723 - DNA, 26 bp, Homo sapiens
tacaagcgaaaaacaagcaaccccat

SEQ ID NO: 119724 - DNA, 26 bp, Homo sapiens
acaagcgaaaaacaagcaaccccatt

SEQ ID NO: 119725 - DNA, 26 bp, Homo sapiens
caagcgaaaaacaagcaaccccatta

SEQ ID NO: 119726 - DNA, 26 bp, Homo sapiens
aagcgaaaaacaagcaaccccattaa

SEQ ID NO: 119727 - DNA, 26 bp, Homo sapiens
agcgaaaaacaagcaaccccattaaa

SEQ ID NO: 119728 - DNA, 26 bp, Homo sapiens
gcgaaaaacaagcaaccccattaaaa

SEQ ID NO: 119729 - DNA, 26 bp, Homo sapiens
cgaaaaacaagcaaccccattaaaaa

SEQ ID NO: 119730 - DNA, 26 bp, Homo sapiens
gaaaaacaagcaaccccattaaaaag

SEQ ID NO: 119731 - DNA, 26 bp, Homo sapiens
aaaaacaagcaaccccattaaaaaga

SEQ ID NO: 119732 - DNA, 26 bp, Homo sapiens
aaaacaagcaaccccattaaaaagaa

SEQ ID NO: 119733 - DNA, 26 bp, Homo sapiens
aaacaagcaaccccattaaaaagaaa

SEQ ID NO: 119734 - DNA, 26 bp, Homo sapiens
aacaagcaaccccattaaaaagaaag

SEQ ID NO: 119735 - DNA, 26 bp, Homo sapiens
acaagcaaccccattaaaaagaaagt

SEQ ID NO: 119736 - DNA, 26 bp, Homo sapiens
caagcaaccccattaaaaagaaagtg

SEQ ID NO: 119737 - DNA, 26 bp, Homo sapiens
aagcaaccccattaaaaagaaagtgg

SEQ ID NO: 119738 - DNA, 26 bp, Homo sapiens
agcaaccccattaaaaagaaagtggg

SEQ ID NO: 119739 - DNA, 26 bp, Homo sapiens
gcaaccccattaaaaagaaagtgggc

SEQ ID NO: 119740 - DNA, 26 bp, Homo sapiens
caaccccattaaaaagaaagtgggca

SEQ ID NO: 119741 - DNA, 26 bp, Homo sapiens
aaccccattaaaaagaaagtgggcaa

SEQ ID NO: 119742 - DNA, 26 bp, Homo sapiens
accccattaaaaagaaagtgggcaaa

SEQ ID NO: 119743 - DNA, 26 bp, Homo sapiens
ccccattaaaaagaaagtgggcaaag

SEQ ID NO: 119744 - DNA, 26 bp, Homo sapiens
cccattaaaaagaaagtgggcaaaga

SEQ ID NO: 119745 - DNA, 26 bp, Homo sapiens
ccattaaaaagaaagtgggcaaagaa

SEQ ID NO: 119746 - DNA, 26 bp, Homo sapiens
cattaaaaagaaagtgggcaaagaac

SEQ ID NO: 119747 - DNA, 26 bp, Homo sapiens
attaaaaagaaagtgggcaaagaaca

SEQ ID NO: 119748 - DNA, 26 bp, Homo sapiens
ttaaaaagaaagtgggcaaagaacat

SEQ ID NO: 119749 - DNA, 26 bp, Homo sapiens
taaaaagaaagtgggcaaagaacatg

SEQ ID NO: 119750 - DNA, 26 bp, Homo sapiens
aaaaagaaagtgggcaaagaacatga

SEQ ID NO: 119751 - DNA, 26 bp, Homo sapiens
aaaagaaagtgggcaaagaacatgaa

SEQ ID NO: 119752 - DNA, 26 bp, Homo sapiens
aaagaaagtgggcaaagaacatgaac

SEQ ID NO: 119753 - DNA, 26 bp, Homo sapiens
aagaaagtgggcaaagaacatgaaca

SEQ ID NO: 119754 - DNA, 26 bp, Homo sapiens
agaaagtgggcaaagaacatgaacac

SEQ ID NO: 119755 - DNA, 26 bp, Homo sapiens
gaaagtgggcaaagaacatgaacaca

SEQ ID NO: 119756 - DNA, 26 bp, Homo sapiens
aaagtgggcaaagaacatgaacacat

SEQ ID NO: 119757 - DNA, 26 bp, Homo sapiens
aagtgggcaaagaacatgaacacatt

SEQ ID NO: 119758 - DNA, 26 bp, Homo sapiens
agtgggcaaagaacatgaacacattt

SEQ ID NO: 119759 - DNA, 26 bp, Homo sapiens
gtgggcaaagaacatgaacacatttc

SEQ ID NO: 119760 - DNA, 26 bp, Homo sapiens
tgggcaaagaacatgaacacatttca

SEQ ID NO: 119761 - DNA, 26 bp, Homo sapiens
gggcaaagaacatgaacacatttcaa

SEQ ID NO: 119762 - DNA, 26 bp, Homo sapiens
ggcaaagaacatgaacacatttcaaa

SEQ ID NO: 119763 - DNA, 26 bp, Homo sapiens
gcaaagaacatgaacacatttcaaaa

SEQ ID NO: 119764 - DNA, 26 bp, Homo sapiens
caaagaacatgaacacatttcaaaag

SEQ ID NO: 119765 - DNA, 26 bp, Homo sapiens
aaagaacatgaacacatttcaaaaga

SEQ ID NO: 119766 - DNA, 26 bp, Homo sapiens
aagaacatgaacacatttcaaaagaa

SEQ ID NO: 119767 - DNA, 26 bp, Homo sapiens
agaacatgaacacatttcaaaagaag

SEQ ID NO: 119768 - DNA, 26 bp, Homo sapiens
gaacatgaacacatttcaaaagaaga

SEQ ID NO: 119769 - DNA, 26 bp, Homo sapiens
aacatgaacacatttcaaaagaagac

SEQ ID NO: 119770 - DNA, 26 bp, Homo sapiens
acatgaacacatttcaaaagaagaca

SEQ ID NO: 119771 - DNA, 26 bp, Homo sapiens
catgaacacatttcaaaagaagacat

SEQ ID NO: 119772 - DNA, 26 bp, Homo sapiens
atgaacacatttcaaaagaagacata

SEQ ID NO: 119773 - DNA, 26 bp, Homo sapiens
tgaacacatttcaaaagaagacatat

SEQ ID NO: 119774 - DNA, 26 bp, Homo sapiens
gaacacatttcaaaagaagacatata

SEQ ID NO: 119775 - DNA, 26 bp, Homo sapiens
aacacatttcaaaagaagacatatat

SEQ ID NO: 119776 - DNA, 26 bp, Homo sapiens
acacatttcaaaagaagacatatatg

SEQ ID NO: 119777 - DNA, 26 bp, Homo sapiens
cacatttcaaaagaagacatatatgc

SEQ ID NO: 119778 - DNA, 26 bp, Homo sapiens
acatttcaaaagaagacatatatgca

SEQ ID NO: 119779 - DNA, 26 bp, Homo sapiens
catttcaaaagaagacatatatgcat

SEQ ID NO: 119780 - DNA, 26 bp, Homo sapiens
atttcaaaagaagacatatatgcatt

SEQ ID NO: 119781 - DNA, 26 bp, Homo sapiens
tttcaaaagaagacatatatgcattt

SEQ ID NO: 119782 - DNA, 26 bp, Homo sapiens
ttcaaaagaagacatatatgcattta

SEQ ID NO: 119783 - DNA, 26 bp, Homo sapiens
tcaaaagaagacatatatgcatttaa

SEQ ID NO: 119784 - DNA, 26 bp, Homo sapiens
caaaagaagacatatatgcatttaaa

SEQ ID NO: 119785 - DNA, 26 bp, Homo sapiens
aaaagaagacatatatgcatttaaaa

SEQ ID NO: 119786 - DNA, 26 bp, Homo sapiens
aaagaagacatatatgcatttaaaaa

SEQ ID NO: 119787 - DNA, 26 bp, Homo sapiens
aagaagacatatatgcatttaaaaag

SEQ ID NO: 119788 - DNA, 26 bp, Homo sapiens
agaagacatatatgcatttaaaaagc

SEQ ID NO: 119789 - DNA, 26 bp, Homo sapiens
gaagacatatatgcatttaaaaagca

SEQ ID NO: 119790 - DNA, 26 bp, Homo sapiens
aagacatatatgcatttaaaaagcat

SEQ ID NO: 119791 - DNA, 26 bp, Homo sapiens
agacatatatgcatttaaaaagcata

SEQ ID NO: 119792 - DNA, 26 bp, Homo sapiens
gacatatatgcatttaaaaagcatat

SEQ ID NO: 119793 - DNA, 26 bp, Homo sapiens
acatatatgcatttaaaaagcatata

SEQ ID NO: 119794 - DNA, 26 bp, Homo sapiens
catatatgcatttaaaaagcatataa

SEQ ID NO: 119795 - DNA, 26 bp, Homo sapiens
atatatgcatttaaaaagcatataaa

SEQ ID NO: 119796 - DNA, 26 bp, Homo sapiens
tatatgcatttaaaaagcatataaaa

SEQ ID NO: 119797 - DNA, 26 bp, Homo sapiens
atatgcatttaaaaagcatataaaaa

SEQ ID NO: 119798 - DNA, 26 bp, Homo sapiens
tatgcatttaaaaagcatataaaaat

SEQ ID NO: 119799 - DNA, 26 bp, Homo sapiens
atgcatttaaaaagcatataaaaatc

SEQ ID NO: 119800 - DNA, 26 bp, Homo sapiens
tgcatttaaaaagcatataaaaatca

SEQ ID NO: 119801 - DNA, 26 bp, Homo sapiens
gcatttaaaaagcatataaaaatcac

SEQ ID NO: 119802 - DNA, 26 bp, Homo sapiens
catttaaaaagcatataaaaatcact

SEQ ID NO: 119803 - DNA, 26 bp, Homo sapiens
atttaaaaagcatataaaaatcactc

SEQ ID NO: 119804 - DNA, 26 bp, Homo sapiens
tttaaaaagcatataaaaatcactca

SEQ ID NO: 119805 - DNA, 26 bp, Homo sapiens
ttaaaaagcatataaaaatcactcat

SEQ ID NO: 119806 - DNA, 26 bp, Homo sapiens
taaaaagcatataaaaatcactcatc

SEQ ID NO: 119807 - DNA, 26 bp, Homo sapiens
aaaaagcatataaaaatcactcatca

SEQ ID NO: 119808 - DNA, 26 bp, Homo sapiens
aaaagcatataaaaatcactcatcat

SEQ ID NO: 119809 - DNA, 26 bp, Homo sapiens
aaagcatataaaaatcactcatcatc

SEQ ID NO: 119810 - DNA, 26 bp, Homo sapiens
aagcatataaaaatcactcatcatca

SEQ ID NO: 119811 - DNA, 26 bp, Homo sapiens
agcatataaaaatcactcatcatcac

SEQ ID NO: 119812 - DNA, 26 bp, Homo sapiens
gcatataaaaatcactcatcatcact

SEQ ID NO: 119813 - DNA, 26 bp, Homo sapiens
catataaaaatcactcatcatcacta

SEQ ID NO: 119814 - DNA, 26 bp, Homo sapiens
atataaaaatcactcatcatcactaa

SEQ ID NO: 119815 - DNA, 26 bp, Homo sapiens
tataaaaatcactcatcatcactaat

SEQ ID NO: 119816 - DNA, 26 bp, Homo sapiens
ataaaaatcactcatcatcactaatc

SEQ ID NO: 119817 - DNA, 26 bp, Homo sapiens
taaaaatcactcatcatcactaatca

SEQ ID NO: 119818 - DNA, 26 bp, Homo sapiens
aaaaatcactcatcatcactaatcac

SEQ ID NO: 119819 - DNA, 26 bp, Homo sapiens
aaaatcactcatcatcactaatcact

SEQ ID NO: 119820 - DNA, 26 bp, Homo sapiens
aaatcactcatcatcactaatcacta

SEQ ID NO: 119821 - DNA, 26 bp, Homo sapiens
aatcactcatcatcactaatcactac

SEQ ID NO: 119822 - DNA, 26 bp, Homo sapiens
atcactcatcatcactaatcactaca

SEQ ID NO: 119823 - DNA, 26 bp, Homo sapiens
tcactcatcatcactaatcactacag

SEQ ID NO: 119824 - DNA, 26 bp, Homo sapiens
cactcatcatcactaatcactacaga

SEQ ID NO: 119825 - DNA, 26 bp, Homo sapiens
actcatcatcactaatcactacagaa

SEQ ID NO: 119826 - DNA, 26 bp, Homo sapiens
ctcatcatcactaatcactacagaaa

SEQ ID NO: 119827 - DNA, 26 bp, Homo sapiens
tcatcatcactaatcactacagaaat

SEQ ID NO: 119828 - DNA, 26 bp, Homo sapiens
catcatcactaatcactacagaaatg

SEQ ID NO: 119829 - DNA, 26 bp, Homo sapiens
atcatcactaatcactacagaaatgc

SEQ ID NO: 119830 - DNA, 26 bp, Homo sapiens
tcatcactaatcactacagaaatgca

SEQ ID NO: 119831 - DNA, 26 bp, Homo sapiens
catcactaatcactacagaaatgcat

SEQ ID NO: 119832 - DNA, 26 bp, Homo sapiens
atcactaatcactacagaaatgcata

SEQ ID NO: 119833 - DNA, 26 bp, Homo sapiens
tcactaatcactacagaaatgcatac

SEQ ID NO: 119834 - DNA, 26 bp, Homo sapiens
cactaatcactacagaaatgcatacc

SEQ ID NO: 119835 - DNA, 26 bp, Homo sapiens
actaatcactacagaaatgcatacca

SEQ ID NO: 119836 - DNA, 26 bp, Homo sapiens
ctaatcactacagaaatgcataccat

SEQ ID NO: 119837 - DNA, 26 bp, Homo sapiens
taatcactacagaaatgcataccatc

SEQ ID NO: 119838 - DNA, 26 bp, Homo sapiens
aatcactacagaaatgcataccatct

SEQ ID NO: 119839 - DNA, 26 bp, Homo sapiens
atcactacagaaatgcataccatctc

SEQ ID NO: 119840 - DNA, 26 bp, Homo sapiens
tcactacagaaatgcataccatctca

SEQ ID NO: 119841 - DNA, 26 bp, Homo sapiens
cactacagaaatgcataccatctcac

SEQ ID NO: 119842 - DNA, 26 bp, Homo sapiens
actacagaaatgcataccatctcaca

SEQ ID NO: 119843 - DNA, 26 bp, Homo sapiens
ctacagaaatgcataccatctcacac

SEQ ID NO: 119844 - DNA, 26 bp, Homo sapiens
tacagaaatgcataccatctcacacc

SEQ ID NO: 119845 - DNA, 26 bp, Homo sapiens
acagaaatgcataccatctcacacca

SEQ ID NO: 119846 - DNA, 26 bp, Homo sapiens
cagaaatgcataccatctcacaccag

SEQ ID NO: 119847 - DNA, 26 bp, Homo sapiens
agaaatgcataccatctcacaccagt

SEQ ID NO: 119848 - DNA, 26 bp, Homo sapiens
gaaatgcataccatctcacaccagtc

SEQ ID NO: 119849 - DNA, 26 bp, Homo sapiens
aaatgcataccatctcacaccagtca

SEQ ID NO: 119850 - DNA, 26 bp, Homo sapiens
aatgcataccatctcacaccagtcag

SEQ ID NO: 119851 - DNA, 26 bp, Homo sapiens
atgcataccatctcacaccagtcaga

SEQ ID NO: 119852 - DNA, 26 bp, Homo sapiens
tgcataccatctcacaccagtcagaa

SEQ ID NO: 119853 - DNA, 26 bp, Homo sapiens
gcataccatctcacaccagtcagaat

SEQ ID NO: 119854 - DNA, 26 bp, Homo sapiens
cataccatctcacaccagtcagaatg

SEQ ID NO: 119855 - DNA, 26 bp, Homo sapiens
ataccatctcacaccagtcagaatgg

SEQ ID NO: 119856 - DNA, 26 bp, Homo sapiens
taccatctcacaccagtcagaatggc

SEQ ID NO: 119857 - DNA, 26 bp, Homo sapiens
accatctcacaccagtcagaatggct

SEQ ID NO: 119858 - DNA, 26 bp, Homo sapiens
ccatctcacaccagtcagaatggctg

SEQ ID NO: 119859 - DNA, 26 bp, Homo sapiens
catctcacaccagtcagaatggctgt

SEQ ID NO: 119860 - DNA, 26 bp, Homo sapiens
atctcacaccagtcagaatggctgtt

SEQ ID NO: 119861 - DNA, 26 bp, Homo sapiens
tctcacaccagtcagaatggctgtta

SEQ ID NO: 119862 - DNA, 26 bp, Homo sapiens
ctcacaccagtcagaatggctgttac

SEQ ID NO: 119863 - DNA, 26 bp, Homo sapiens
tcacaccagtcagaatggctgttact

SEQ ID NO: 119864 - DNA, 26 bp, Homo sapiens
cacaccagtcagaatggctgttacta

SEQ ID NO: 119865 - DNA, 26 bp, Homo sapiens
acaccagtcagaatggctgttactag

SEQ ID NO: 119866 - DNA, 26 bp, Homo sapiens
caccagtcagaatggctgttactaga

SEQ ID NO: 119867 - DNA, 26 bp, Homo sapiens
accagtcagaatggctgttactagaa

SEQ ID NO: 119868 - DNA, 26 bp, Homo sapiens
ccagtcagaatggctgttactagaaa

SEQ ID NO: 119869 - DNA, 26 bp, Homo sapiens
cagtcagaatggctgttactagaaag

SEQ ID NO: 119870 - DNA, 26 bp, Homo sapiens
agtcagaatggctgttactagaaagt

SEQ ID NO: 119871 - DNA, 26 bp, Homo sapiens
gtcagaatggctgttactagaaagtc

SEQ ID NO: 119872 - DNA, 26 bp, Homo sapiens
tcagaatggctgttactagaaagtca

SEQ ID NO: 119873 - DNA, 26 bp, Homo sapiens
cagaatggctgttactagaaagtcaa

SEQ ID NO: 119874 - DNA, 26 bp, Homo sapiens
agaatggctgttactagaaagtcaat

SEQ ID NO: 119875 - DNA, 26 bp, Homo sapiens
gaatggctgttactagaaagtcaata

SEQ ID NO: 119876 - DNA, 26 bp, Homo sapiens
aatggctgttactagaaagtcaataa

SEQ ID NO: 119877 - DNA, 26 bp, Homo sapiens
atggctgttactagaaagtcaataaa

SEQ ID NO: 119878 - DNA, 26 bp, Homo sapiens
tggctgttactagaaagtcaataaat

SEQ ID NO: 119879 - DNA, 26 bp, Homo sapiens
ggctgttactagaaagtcaataaata

SEQ ID NO: 119880 - DNA, 26 bp, Homo sapiens
gctgttactagaaagtcaataaataa

SEQ ID NO: 119881 - DNA, 26 bp, Homo sapiens
ctgttactagaaagtcaataaataac

SEQ ID NO: 119882 - DNA, 26 bp, Homo sapiens
tgttactagaaagtcaataaataaca

SEQ ID NO: 119883 - DNA, 26 bp, Homo sapiens
gttactagaaagtcaataaataacag

SEQ ID NO: 119884 - DNA, 26 bp, Homo sapiens
ttactagaaagtcaataaataacaga

SEQ ID NO: 119885 - DNA, 26 bp, Homo sapiens
tactagaaagtcaataaataacagat

SEQ ID NO: 119886 - DNA, 26 bp, Homo sapiens
actagaaagtcaataaataacagatg

SEQ ID NO: 119887 - DNA, 26 bp, Homo sapiens
ctagaaagtcaataaataacagatgc

SEQ ID NO: 119888 - DNA, 26 bp, Homo sapiens
tagaaagtcaataaataacagatgct

SEQ ID NO: 119889 - DNA, 26 bp, Homo sapiens
agaaagtcaataaataacagatgctg

SEQ ID NO: 119890 - DNA, 26 bp, Homo sapiens
gaaagtcaataaataacagatgctgg

SEQ ID NO: 119891 - DNA, 26 bp, Homo sapiens
aaagtcaataaataacagatgctggc

SEQ ID NO: 119892 - DNA, 26 bp, Homo sapiens
aagtcaataaataacagatgctggca

SEQ ID NO: 119893 - DNA, 26 bp, Homo sapiens
agtcaataaataacagatgctggcaa

SEQ ID NO: 119894 - DNA, 26 bp, Homo sapiens
gtcaataaataacagatgctggcaag

SEQ ID NO: 119895 - DNA, 26 bp, Homo sapiens
tcaataaataacagatgctggcaagg

SEQ ID NO: 119896 - DNA, 26 bp, Homo sapiens
caataaataacagatgctggcaaggt

SEQ ID NO: 119897 - DNA, 26 bp, Homo sapiens
aataaataacagatgctggcaaggtt

SEQ ID NO: 119898 - DNA, 26 bp, Homo sapiens
ataaataacagatgctggcaaggttg

SEQ ID NO: 119899 - DNA, 26 bp, Homo sapiens
taaataacagatgctggcaaggttgt

SEQ ID NO: 119900 - DNA, 26 bp, Homo sapiens
aaataacagatgctggcaaggttgtg

SEQ ID NO: 119901 - DNA, 26 bp, Homo sapiens
aataacagatgctggcaaggttgtgg

SEQ ID NO: 119902 - DNA, 26 bp, Homo sapiens
ataacagatgctggcaaggttgtgga

SEQ ID NO: 119903 - DNA, 26 bp, Homo sapiens
taacagatgctggcaaggttgtggag

SEQ ID NO: 119904 - DNA, 26 bp, Homo sapiens
aacagatgctggcaaggttgtggaga

SEQ ID NO: 119905 - DNA, 26 bp, Homo sapiens
acagatgctggcaaggttgtggagaa

SEQ ID NO: 119906 - DNA, 26 bp, Homo sapiens
cagatgctggcaaggttgtggagaaa

SEQ ID NO: 119907 - DNA, 26 bp, Homo sapiens
agatgctggcaaggttgtggagaaaa

SEQ ID NO: 119908 - DNA, 26 bp, Homo sapiens
gatgctggcaaggttgtggagaaaat

SEQ ID NO: 119909 - DNA, 26 bp, Homo sapiens
atgctggcaaggttgtggagaaaatg

SEQ ID NO: 119910 - DNA, 26 bp, Homo sapiens
tgctggcaaggttgtggagaaaatgg

SEQ ID NO: 119911 - DNA, 26 bp, Homo sapiens
gctggcaaggttgtggagaaaatgga

SEQ ID NO: 119912 - DNA, 26 bp, Homo sapiens
ctggcaaggttgtggagaaaatggaa

SEQ ID NO: 119913 - DNA, 26 bp, Homo sapiens
tggcaaggttgtggagaaaatggaac

SEQ ID NO: 119914 - DNA, 26 bp, Homo sapiens
ggcaaggttgtggagaaaatggaaca

SEQ ID NO: 119915 - DNA, 26 bp, Homo sapiens
gcaaggttgtggagaaaatggaacac

SEQ ID NO: 119916 - DNA, 26 bp, Homo sapiens
caaggttgtggagaaaatggaacaca

SEQ ID NO: 119917 - DNA, 26 bp, Homo sapiens
aaggttgtggagaaaatggaacacat

SEQ ID NO: 119918 - DNA, 26 bp, Homo sapiens
aggttgtggagaaaatggaacacata

SEQ ID NO: 119919 - DNA, 26 bp, Homo sapiens
ggttgtggagaaaatggaacacatac

SEQ ID NO: 119920 - DNA, 26 bp, Homo sapiens
gttgtggagaaaatggaacacataca

SEQ ID NO: 119921 - DNA, 26 bp, Homo sapiens
ttgtggagaaaatggaacacatacac

SEQ ID NO: 119922 - DNA, 26 bp, Homo sapiens
tgtggagaaaatggaacacatacact

SEQ ID NO: 119923 - DNA, 26 bp, Homo sapiens
gtggagaaaatggaacacatacactg

SEQ ID NO: 119924 - DNA, 26 bp, Homo sapiens
tggagaaaatggaacacatacactgt

SEQ ID NO: 119925 - DNA, 26 bp, Homo sapiens
ggagaaaatggaacacatacactgtt

SEQ ID NO: 119926 - DNA, 26 bp, Homo sapiens
gagaaaatggaacacatacactgttg

SEQ ID NO: 119927 - DNA, 26 bp, Homo sapiens
agaaaatggaacacatacactgttgg

SEQ ID NO: 119928 - DNA, 26 bp, Homo sapiens
gaaaatggaacacatacactgttggt

SEQ ID NO: 119929 - DNA, 26 bp, Homo sapiens
aaaatggaacacatacactgttggtg

SEQ ID NO: 119930 - DNA, 26 bp, Homo sapiens
aaatggaacacatacactgttggtgg

SEQ ID NO: 119931 - DNA, 26 bp, Homo sapiens
aatggaacacatacactgttggtggg

SEQ ID NO: 119932 - DNA, 26 bp, Homo sapiens
atggaacacatacactgttggtggga

SEQ ID NO: 119933 - DNA, 26 bp, Homo sapiens
tggaacacatacactgttggtgggag

SEQ ID NO: 119934 - DNA, 26 bp, Homo sapiens
ggaacacatacactgttggtgggagt

SEQ ID NO: 119935 - DNA, 26 bp, Homo sapiens
gaacacatacactgttggtgggagtg

SEQ ID NO: 119936 - DNA, 26 bp, Homo sapiens
aacacatacactgttggtgggagtgt

SEQ ID NO: 119937 - DNA, 26 bp, Homo sapiens
acacatacactgttggtgggagtgta

SEQ ID NO: 119938 - DNA, 26 bp, Homo sapiens
cacatacactgttggtgggagtgtaa

SEQ ID NO: 119939 - DNA, 26 bp, Homo sapiens
acatacactgttggtgggagtgtaaa

SEQ ID NO: 119940 - DNA, 26 bp, Homo sapiens
catacactgttggtgggagtgtaaat

SEQ ID NO: 119941 - DNA, 26 bp, Homo sapiens
atacactgttggtgggagtgtaaatt

SEQ ID NO: 119942 - DNA, 26 bp, Homo sapiens
tacactgttggtgggagtgtaaatta

SEQ ID NO: 119943 - DNA, 26 bp, Homo sapiens
acactgttggtgggagtgtaaattag

SEQ ID NO: 119944 - DNA, 26 bp, Homo sapiens
cactgttggtgggagtgtaaattagt

SEQ ID NO: 119945 - DNA, 26 bp, Homo sapiens
actgttggtgggagtgtaaattagtt

SEQ ID NO: 119946 - DNA, 26 bp, Homo sapiens
ctgttggtgggagtgtaaattagttt

SEQ ID NO: 119947 - DNA, 26 bp, Homo sapiens
tgttggtgggagtgtaaattagttta

SEQ ID NO: 119948 - DNA, 26 bp, Homo sapiens
gttggtgggagtgtaaattagtttag

SEQ ID NO: 119949 - DNA, 26 bp, Homo sapiens
ttggtgggagtgtaaattagtttagc

SEQ ID NO: 119950 - DNA, 26 bp, Homo sapiens
tggtgggagtgtaaattagtttagcc

SEQ ID NO: 119951 - DNA, 26 bp, Homo sapiens
ggtgggagtgtaaattagtttagcca

SEQ ID NO: 119952 - DNA, 26 bp, Homo sapiens
gtgggagtgtaaattagtttagccac

SEQ ID NO: 119953 - DNA, 26 bp, Homo sapiens
tgggagtgtaaattagtttagccact

SEQ ID NO: 119954 - DNA, 26 bp, Homo sapiens
gggagtgtaaattagtttagccactg

SEQ ID NO: 119955 - DNA, 26 bp, Homo sapiens
ggagtgtaaattagtttagccactgt

SEQ ID NO: 119956 - DNA, 26 bp, Homo sapiens
gagtgtaaattagtttagccactgtg

SEQ ID NO: 119957 - DNA, 26 bp, Homo sapiens
agtgtaaattagtttagccactgtgg

SEQ ID NO: 119958 - DNA, 26 bp, Homo sapiens
gtgtaaattagtttagccactgtgga

SEQ ID NO: 119959 - DNA, 26 bp, Homo sapiens
tgtaaattagtttagccactgtggaa

SEQ ID NO: 119960 - DNA, 26 bp, Homo sapiens
gtaaattagtttagccactgtggaaa

SEQ ID NO: 119961 - DNA, 26 bp, Homo sapiens
taaattagtttagccactgtggaaag

SEQ ID NO: 119962 - DNA, 26 bp, Homo sapiens
aaattagtttagccactgtggaaagc

SEQ ID NO: 119963 - DNA, 26 bp, Homo sapiens
aattagtttagccactgtggaaagca

SEQ ID NO: 119964 - DNA, 26 bp, Homo sapiens
attagtttagccactgtggaaagcag

SEQ ID NO: 119965 - DNA, 26 bp, Homo sapiens
ttagtttagccactgtggaaagcagg

SEQ ID NO: 119966 - DNA, 26 bp, Homo sapiens
tagtttagccactgtggaaagcaggt

SEQ ID NO: 119967 - DNA, 26 bp, Homo sapiens
agtttagccactgtggaaagcaggtt

SEQ ID NO: 119968 - DNA, 26 bp, Homo sapiens
gtttagccactgtggaaagcaggttg

SEQ ID NO: 119969 - DNA, 26 bp, Homo sapiens
tttagccactgtggaaagcaggttgg

SEQ ID NO: 119970 - DNA, 26 bp, Homo sapiens
ttagccactgtggaaagcaggttggt

SEQ ID NO: 119971 - DNA, 26 bp, Homo sapiens
tagccactgtggaaagcaggttggtg

SEQ ID NO: 119972 - DNA, 26 bp, Homo sapiens
agccactgtggaaagcaggttggtga

SEQ ID NO: 119973 - DNA, 26 bp, Homo sapiens
gccactgtggaaagcaggttggtgat

SEQ ID NO: 119974 - DNA, 26 bp, Homo sapiens
ccactgtggaaagcaggttggtgatt

SEQ ID NO: 119975 - DNA, 26 bp, Homo sapiens
cactgtggaaagcaggttggtgattc

SEQ ID NO: 119976 - DNA, 26 bp, Homo sapiens
actgtggaaagcaggttggtgattcc

SEQ ID NO: 119977 - DNA, 26 bp, Homo sapiens
ctgtggaaagcaggttggtgattcct

SEQ ID NO: 119978 - DNA, 26 bp, Homo sapiens
tgtggaaagcaggttggtgattcctc

SEQ ID NO: 119979 - DNA, 26 bp, Homo sapiens
gtggaaagcaggttggtgattcctca

SEQ ID NO: 119980 - DNA, 26 bp, Homo sapiens
tggaaagcaggttggtgattcctcaa

SEQ ID NO: 119981 - DNA, 26 bp, Homo sapiens
ggaaagcaggttggtgattcctcaaa

SEQ ID NO: 119982 - DNA, 26 bp, Homo sapiens
gaaagcaggttggtgattcctcaaag

SEQ ID NO: 119983 - DNA, 26 bp, Homo sapiens
aaagcaggttggtgattcctcaaaga

SEQ ID NO: 119984 - DNA, 26 bp, Homo sapiens
aagcaggttggtgattcctcaaagaa

SEQ ID NO: 119985 - DNA, 26 bp, Homo sapiens
agcaggttggtgattcctcaaagaac

SEQ ID NO: 119986 - DNA, 26 bp, Homo sapiens
gcaggttggtgattcctcaaagaact

SEQ ID NO: 119987 - DNA, 26 bp, Homo sapiens
caggttggtgattcctcaaagaactc

SEQ ID NO: 119988 - DNA, 26 bp, Homo sapiens
aggttggtgattcctcaaagaactca

SEQ ID NO: 119989 - DNA, 26 bp, Homo sapiens
ggttggtgattcctcaaagaactcag

SEQ ID NO: 119990 - DNA, 26 bp, Homo sapiens
gttggtgattcctcaaagaactcaga

SEQ ID NO: 119991 - DNA, 26 bp, Homo sapiens
ttggtgattcctcaaagaactcagaa

SEQ ID NO: 119992 - DNA, 26 bp, Homo sapiens
tggtgattcctcaaagaactcagaat

SEQ ID NO: 119993 - DNA, 26 bp, Homo sapiens
ggtgattcctcaaagaactcagaatt

SEQ ID NO: 119994 - DNA, 26 bp, Homo sapiens
gtgattcctcaaagaactcagaatta

SEQ ID NO: 119995 - DNA, 26 bp, Homo sapiens
tgattcctcaaagaactcagaattac

SEQ ID NO: 119996 - DNA, 26 bp, Homo sapiens
gattcctcaaagaactcagaattacc

SEQ ID NO: 119997 - DNA, 26 bp, Homo sapiens
attcctcaaagaactcagaattacca

SEQ ID NO: 119998 - DNA, 26 bp, Homo sapiens
ttcctcaaagaactcagaattaccat

SEQ ID NO: 119999 - DNA, 26 bp, Homo sapiens
tcctcaaagaactcagaattaccatt

SEQ ID NO: 120000 - DNA, 26 bp, Homo sapiens
cctcaaagaactcagaattaccattc

SEQ ID NO: 120001 - DNA, 26 bp, Homo sapiens
ctcaaagaactcagaattaccattca

SEQ ID NO: 120002 - DNA, 26 bp, Homo sapiens
tcaaagaactcagaattaccattcaa

SEQ ID NO: 120003 - DNA, 26 bp, Homo sapiens
caaagaactcagaattaccattcaac

SEQ ID NO: 120004 - DNA, 26 bp, Homo sapiens
aaagaactcagaattaccattcaact

SEQ ID NO: 120005 - DNA, 26 bp, Homo sapiens
aagaactcagaattaccattcaactc

SEQ ID NO: 120006 - DNA, 26 bp, Homo sapiens
agaactcagaattaccattcaactca

SEQ ID NO: 120007 - DNA, 26 bp, Homo sapiens
gaactcagaattaccattcaactcag

SEQ ID NO: 120008 - DNA, 26 bp, Homo sapiens
aactcagaattaccattcaactcagc

SEQ ID NO: 120009 - DNA, 26 bp, Homo sapiens
actcagaattaccattcaactcagca

SEQ ID NO: 120010 - DNA, 26 bp, Homo sapiens
ctcagaattaccattcaactcagcaa

SEQ ID NO: 120011 - DNA, 26 bp, Homo sapiens
tcagaattaccattcaactcagcaat

SEQ ID NO: 120012 - DNA, 26 bp, Homo sapiens
cagaattaccattcaactcagcaatc

SEQ ID NO: 120013 - DNA, 26 bp, Homo sapiens
agaattaccattcaactcagcaatcc

SEQ ID NO: 120014 - DNA, 26 bp, Homo sapiens
gaattaccattcaactcagcaatccc

SEQ ID NO: 120015 - DNA, 26 bp, Homo sapiens
aattaccattcaactcagcaatccca

SEQ ID NO: 120016 - DNA, 26 bp, Homo sapiens
attaccattcaactcagcaatcccat

SEQ ID NO: 120017 - DNA, 26 bp, Homo sapiens
ttaccattcaactcagcaatcccatt

SEQ ID NO: 120018 - DNA, 26 bp, Homo sapiens
taccattcaactcagcaatcccatta

SEQ ID NO: 120019 - DNA, 26 bp, Homo sapiens
accattcaactcagcaatcccattat

SEQ ID NO: 120020 - DNA, 26 bp, Homo sapiens
ccattcaactcagcaatcccattatt

SEQ ID NO: 120021 - DNA, 26 bp, Homo sapiens
cattcaactcagcaatcccattattc

SEQ ID NO: 120022 - DNA, 26 bp, Homo sapiens
attcaactcagcaatcccattattcc

SEQ ID NO: 120023 - DNA, 26 bp, Homo sapiens
ttcaactcagcaatcccattattccc

SEQ ID NO: 120024 - DNA, 26 bp, Homo sapiens
tcaactcagcaatcccattattccca

SEQ ID NO: 120025 - DNA, 26 bp, Homo sapiens
caactcagcaatcccattattcccaa

SEQ ID NO: 120026 - DNA, 26 bp, Homo sapiens
aactcagcaatcccattattcccaaa

SEQ ID NO: 120027 - DNA, 26 bp, Homo sapiens
actcagcaatcccattattcccaaag

SEQ ID NO: 120028 - DNA, 26 bp, Homo sapiens
ctcagcaatcccattattcccaaagg

SEQ ID NO: 120029 - DNA, 26 bp, Homo sapiens
tcagcaatcccattattcccaaagga

SEQ ID NO: 120030 - DNA, 26 bp, Homo sapiens
cagcaatcccattattcccaaaggaa

SEQ ID NO: 120031 - DNA, 26 bp, Homo sapiens
agcaatcccattattcccaaaggaat

SEQ ID NO: 120032 - DNA, 26 bp, Homo sapiens
gcaatcccattattcccaaaggaatg

SEQ ID NO: 120033 - DNA, 26 bp, Homo sapiens
caatcccattattcccaaaggaatgc

SEQ ID NO: 120034 - DNA, 26 bp, Homo sapiens
aatcccattattcccaaaggaatgca

SEQ ID NO: 120035 - DNA, 26 bp, Homo sapiens
atcccattattcccaaaggaatgcat

SEQ ID NO: 120036 - DNA, 26 bp, Homo sapiens
tcccattattcccaaaggaatgcata

SEQ ID NO: 120037 - DNA, 26 bp, Homo sapiens
cccattattcccaaaggaatgcatat

SEQ ID NO: 120038 - DNA, 26 bp, Homo sapiens
ccattattcccaaaggaatgcatatc

SEQ ID NO: 120039 - DNA, 26 bp, Homo sapiens
cattattcccaaaggaatgcatatcc

SEQ ID NO: 120040 - DNA, 26 bp, Homo sapiens
attattcccaaaggaatgcatatccc

SEQ ID NO: 120041 - DNA, 26 bp, Homo sapiens
ttattcccaaaggaatgcatatccca

SEQ ID NO: 120042 - DNA, 26 bp, Homo sapiens
tattcccaaaggaatgcatatcccaa

SEQ ID NO: 120043 - DNA, 26 bp, Homo sapiens
attcccaaaggaatgcatatcccaag

SEQ ID NO: 120044 - DNA, 26 bp, Homo sapiens
ttcccaaaggaatgcatatcccaagg

SEQ ID NO: 120045 - DNA, 26 bp, Homo sapiens
tcccaaaggaatgcatatcccaagga

SEQ ID NO: 120046 - DNA, 26 bp, Homo sapiens
cccaaaggaatgcatatcccaaggaa

SEQ ID NO: 120047 - DNA, 26 bp, Homo sapiens
ccaaaggaatgcatatcccaaggaaa

SEQ ID NO: 120048 - DNA, 26 bp, Homo sapiens
caaaggaatgcatatcccaaggaaat

SEQ ID NO: 120049 - DNA, 26 bp, Homo sapiens
aaaggaatgcatatcccaaggaaata

SEQ ID NO: 120050 - DNA, 26 bp, Homo sapiens
aaggaatgcatatcccaaggaaatat

SEQ ID NO: 120051 - DNA, 26 bp, Homo sapiens
aggaatgcatatcccaaggaaatata

SEQ ID NO: 120052 - DNA, 26 bp, Homo sapiens
ggaatgcatatcccaaggaaatataa

SEQ ID NO: 120053 - DNA, 26 bp, Homo sapiens
gaatgcatatcccaaggaaatataaa

SEQ ID NO: 120054 - DNA, 26 bp, Homo sapiens
aatgcatatcccaaggaaatataaat

SEQ ID NO: 120055 - DNA, 26 bp, Homo sapiens
atgcatatcccaaggaaatataaatc

SEQ ID NO: 120056 - DNA, 26 bp, Homo sapiens
tgcatatcccaaggaaatataaatca

SEQ ID NO: 120057 - DNA, 26 bp, Homo sapiens
gcatatcccaaggaaatataaatcat

SEQ ID NO: 120058 - DNA, 26 bp, Homo sapiens
catatcccaaggaaatataaatcatt

SEQ ID NO: 120059 - DNA, 26 bp, Homo sapiens
atatcccaaggaaatataaatcattg

SEQ ID NO: 120060 - DNA, 26 bp, Homo sapiens
tatcccaaggaaatataaatcattgt

SEQ ID NO: 120061 - DNA, 26 bp, Homo sapiens
atcccaaggaaatataaatcattgta

SEQ ID NO: 120062 - DNA, 26 bp, Homo sapiens
tcccaaggaaatataaatcattgtac

SEQ ID NO: 120063 - DNA, 26 bp, Homo sapiens
cccaaggaaatataaatcattgtacc

SEQ ID NO: 120064 - DNA, 26 bp, Homo sapiens
ccaaggaaatataaatcattgtacca

SEQ ID NO: 120065 - DNA, 26 bp, Homo sapiens
caaggaaatataaatcattgtaccat

SEQ ID NO: 120066 - DNA, 26 bp, Homo sapiens
aaggaaatataaatcattgtaccata

SEQ ID NO: 120067 - DNA, 26 bp, Homo sapiens
aggaaatataaatcattgtaccataa

SEQ ID NO: 120068 - DNA, 26 bp, Homo sapiens
ggaaatataaatcattgtaccataaa

SEQ ID NO: 120069 - DNA, 26 bp, Homo sapiens
gaaatataaatcattgtaccataaag

SEQ ID NO: 120070 - DNA, 26 bp, Homo sapiens
aaatataaatcattgtaccataaagg

SEQ ID NO: 120071 - DNA, 26 bp, Homo sapiens
aatataaatcattgtaccataaaggc

SEQ ID NO: 120072 - DNA, 26 bp, Homo sapiens
atataaatcattgtaccataaaggca

SEQ ID NO: 120073 - DNA, 26 bp, Homo sapiens
tataaatcattgtaccataaaggcac

SEQ ID NO: 120074 - DNA, 26 bp, Homo sapiens
ataaatcattgtaccataaaggcaca

SEQ ID NO: 120075 - DNA, 26 bp, Homo sapiens
taaatcattgtaccataaaggcacat

SEQ ID NO: 120076 - DNA, 26 bp, Homo sapiens
aaatcattgtaccataaaggcacatg

SEQ ID NO: 120077 - DNA, 26 bp, Homo sapiens
aatcattgtaccataaaggcacatgc

SEQ ID NO: 120078 - DNA, 26 bp, Homo sapiens
atcattgtaccataaaggcacatgca

SEQ ID NO: 120079 - DNA, 26 bp, Homo sapiens
tcattgtaccataaaggcacatgcac

SEQ ID NO: 120080 - DNA, 26 bp, Homo sapiens
cattgtaccataaaggcacatgcacg

SEQ ID NO: 120081 - DNA, 26 bp, Homo sapiens
attgtaccataaaggcacatgcacgt

SEQ ID NO: 120082 - DNA, 26 bp, Homo sapiens
ttgtaccataaaggcacatgcacgtg

SEQ ID NO: 120083 - DNA, 26 bp, Homo sapiens
tgtaccataaaggcacatgcacgtgt

SEQ ID NO: 120084 - DNA, 26 bp, Homo sapiens
gtaccataaaggcacatgcacgtgta

SEQ ID NO: 120085 - DNA, 26 bp, Homo sapiens
taccataaaggcacatgcacgtgtat

SEQ ID NO: 120086 - DNA, 26 bp, Homo sapiens
accataaaggcacatgcacgtgtatg

SEQ ID NO: 120087 - DNA, 26 bp, Homo sapiens
ccataaaggcacatgcacgtgtatgt

SEQ ID NO: 120088 - DNA, 26 bp, Homo sapiens
cataaaggcacatgcacgtgtatgtc

SEQ ID NO: 120089 - DNA, 26 bp, Homo sapiens
ataaaggcacatgcacgtgtatgtcc

SEQ ID NO: 120090 - DNA, 26 bp, Homo sapiens
taaaggcacatgcacgtgtatgtcca

SEQ ID NO: 120091 - DNA, 26 bp, Homo sapiens
aaaggcacatgcacgtgtatgtccat

SEQ ID NO: 120092 - DNA, 26 bp, Homo sapiens
aaggcacatgcacgtgtatgtccatt

SEQ ID NO: 120093 - DNA, 26 bp, Homo sapiens
aggcacatgcacgtgtatgtccattg

SEQ ID NO: 120094 - DNA, 26 bp, Homo sapiens
ggcacatgcacgtgtatgtccattgc

SEQ ID NO: 120095 - DNA, 26 bp, Homo sapiens
gcacatgcacgtgtatgtccattgca

SEQ ID NO: 120096 - DNA, 26 bp, Homo sapiens
cacatgcacgtgtatgtccattgcag

SEQ ID NO: 120097 - DNA, 26 bp, Homo sapiens
acatgcacgtgtatgtccattgcagc

SEQ ID NO: 120098 - DNA, 26 bp, Homo sapiens
catgcacgtgtatgtccattgcagca

SEQ ID NO: 120099 - DNA, 26 bp, Homo sapiens
atgcacgtgtatgtccattgcagcac

SEQ ID NO: 120100 - DNA, 26 bp, Homo sapiens
tgcacgtgtatgtccattgcagcact

SEQ ID NO: 120101 - DNA, 26 bp, Homo sapiens
gcacgtgtatgtccattgcagcactg

SEQ ID NO: 120102 - DNA, 26 bp, Homo sapiens
cacgtgtatgtccattgcagcactgt

SEQ ID NO: 120103 - DNA, 26 bp, Homo sapiens
acgtgtatgtccattgcagcactgtt

SEQ ID NO: 120104 - DNA, 26 bp, Homo sapiens
cgtgtatgtccattgcagcactgttc

SEQ ID NO: 120105 - DNA, 26 bp, Homo sapiens
gtgtatgtccattgcagcactgttca

SEQ ID NO: 120106 - DNA, 26 bp, Homo sapiens
tgtatgtccattgcagcactgttcac

SEQ ID NO: 120107 - DNA, 26 bp, Homo sapiens
gtatgtccattgcagcactgttcaca

SEQ ID NO: 120108 - DNA, 26 bp, Homo sapiens
tatgtccattgcagcactgttcacaa

SEQ ID NO: 120109 - DNA, 26 bp, Homo sapiens
atgtccattgcagcactgttcacaat

SEQ ID NO: 120110 - DNA, 26 bp, Homo sapiens
tgtccattgcagcactgttcacaata

SEQ ID NO: 120111 - DNA, 26 bp, Homo sapiens
gtccattgcagcactgttcacaatag

SEQ ID NO: 120112 - DNA, 26 bp, Homo sapiens
tccattgcagcactgttcacaatagc

SEQ ID NO: 120113 - DNA, 26 bp, Homo sapiens
ccattgcagcactgttcacaatagca

SEQ ID NO: 120114 - DNA, 26 bp, Homo sapiens
cattgcagcactgttcacaatagcaa

SEQ ID NO: 120115 - DNA, 26 bp, Homo sapiens
attgcagcactgttcacaatagcaaa

SEQ ID NO: 120116 - DNA, 26 bp, Homo sapiens
ttgcagcactgttcacaatagcaaag

SEQ ID NO: 120117 - DNA, 26 bp, Homo sapiens
tgcagcactgttcacaatagcaaaga

SEQ ID NO: 120118 - DNA, 26 bp, Homo sapiens
gcagcactgttcacaatagcaaagat

SEQ ID NO: 120119 - DNA, 26 bp, Homo sapiens
cagcactgttcacaatagcaaagata

SEQ ID NO: 120120 - DNA, 26 bp, Homo sapiens
agcactgttcacaatagcaaagataa

SEQ ID NO: 120121 - DNA, 26 bp, Homo sapiens
gcactgttcacaatagcaaagataag

SEQ ID NO: 120122 - DNA, 26 bp, Homo sapiens
cactgttcacaatagcaaagataagg

SEQ ID NO: 120123 - DNA, 26 bp, Homo sapiens
actgttcacaatagcaaagataagga

SEQ ID NO: 120124 - DNA, 26 bp, Homo sapiens
ctgttcacaatagcaaagataaggaa

SEQ ID NO: 120125 - DNA, 26 bp, Homo sapiens
tgttcacaatagcaaagataaggaat

SEQ ID NO: 120126 - DNA, 26 bp, Homo sapiens
gttcacaatagcaaagataaggaatc

SEQ ID NO: 120127 - DNA, 26 bp, Homo sapiens
ttcacaatagcaaagataaggaatca

SEQ ID NO: 120128 - DNA, 26 bp, Homo sapiens
tcacaatagcaaagataaggaatcaa

SEQ ID NO: 120129 - DNA, 26 bp, Homo sapiens
cacaatagcaaagataaggaatcaac

SEQ ID NO: 120130 - DNA, 26 bp, Homo sapiens
acaatagcaaagataaggaatcaacc

SEQ ID NO: 120131 - DNA, 26 bp, Homo sapiens
caatagcaaagataaggaatcaacct

SEQ ID NO: 120132 - DNA, 26 bp, Homo sapiens
aatagcaaagataaggaatcaaccta

SEQ ID NO: 120133 - DNA, 26 bp, Homo sapiens
atagcaaagataaggaatcaacctaa

SEQ ID NO: 120134 - DNA, 26 bp, Homo sapiens
tagcaaagataaggaatcaacctaaa

SEQ ID NO: 120135 - DNA, 26 bp, Homo sapiens
agcaaagataaggaatcaacctaaat

SEQ ID NO: 120136 - DNA, 26 bp, Homo sapiens
gcaaagataaggaatcaacctaaatg

SEQ ID NO: 120137 - DNA, 26 bp, Homo sapiens
caaagataaggaatcaacctaaatgt

SEQ ID NO: 120138 - DNA, 26 bp, Homo sapiens
aaagataaggaatcaacctaaatgtg

SEQ ID NO: 120139 - DNA, 26 bp, Homo sapiens
aagataaggaatcaacctaaatgtgc

SEQ ID NO: 120140 - DNA, 26 bp, Homo sapiens
agataaggaatcaacctaaatgtgca

SEQ ID NO: 120141 - DNA, 26 bp, Homo sapiens
gataaggaatcaacctaaatgtgcat

SEQ ID NO: 120142 - DNA, 26 bp, Homo sapiens
ataaggaatcaacctaaatgtgcatt

SEQ ID NO: 120143 - DNA, 26 bp, Homo sapiens
taaggaatcaacctaaatgtgcatta

SEQ ID NO: 120144 - DNA, 26 bp, Homo sapiens
aaggaatcaacctaaatgtgcattaa

SEQ ID NO: 120145 - DNA, 26 bp, Homo sapiens
aggaatcaacctaaatgtgcattaat

SEQ ID NO: 120146 - DNA, 26 bp, Homo sapiens
ggaatcaacctaaatgtgcattaata

SEQ ID NO: 120147 - DNA, 26 bp, Homo sapiens
gaatcaacctaaatgtgcattaataa

SEQ ID NO: 120148 - DNA, 26 bp, Homo sapiens
aatcaacctaaatgtgcattaataat

SEQ ID NO: 120149 - DNA, 26 bp, Homo sapiens
atcaacctaaatgtgcattaataata

SEQ ID NO: 120150 - DNA, 26 bp, Homo sapiens
tcaacctaaatgtgcattaataatag

SEQ ID NO: 120151 - DNA, 26 bp, Homo sapiens
caacctaaatgtgcattaataatagg

SEQ ID NO: 120152 - DNA, 26 bp, Homo sapiens
aacctaaatgtgcattaataataggc

SEQ ID NO: 120153 - DNA, 26 bp, Homo sapiens
acctaaatgtgcattaataataggct

SEQ ID NO: 120154 - DNA, 26 bp, Homo sapiens
cctaaatgtgcattaataataggctg

SEQ ID NO: 120155 - DNA, 26 bp, Homo sapiens
ctaaatgtgcattaataataggctgg

SEQ ID NO: 120156 - DNA, 26 bp, Homo sapiens
taaatgtgcattaataataggctgga

SEQ ID NO: 120157 - DNA, 26 bp, Homo sapiens
aaatgtgcattaataataggctggat

SEQ ID NO: 120158 - DNA, 26 bp, Homo sapiens
aatgtgcattaataataggctggata

SEQ ID NO: 120159 - DNA, 26 bp, Homo sapiens
atgtgcattaataataggctggataa

SEQ ID NO: 120160 - DNA, 26 bp, Homo sapiens
tgtgcattaataataggctggataat

SEQ ID NO: 120161 - DNA, 26 bp, Homo sapiens
gtgcattaataataggctggataatg

SEQ ID NO: 120162 - DNA, 26 bp, Homo sapiens
tgcattaataataggctggataatga

SEQ ID NO: 120163 - DNA, 26 bp, Homo sapiens
gcattaataataggctggataatgaa

SEQ ID NO: 120164 - DNA, 26 bp, Homo sapiens
cattaataataggctggataatgaaa

SEQ ID NO: 120165 - DNA, 26 bp, Homo sapiens
attaataataggctggataatgaaaa

SEQ ID NO: 120166 - DNA, 26 bp, Homo sapiens
ttaataataggctggataatgaaaat

SEQ ID NO: 120167 - DNA, 26 bp, Homo sapiens
taataataggctggataatgaaaatg

SEQ ID NO: 120168 - DNA, 26 bp, Homo sapiens
aataataggctggataatgaaaatgt

SEQ ID NO: 120169 - DNA, 26 bp, Homo sapiens
ataataggctggataatgaaaatgtg

SEQ ID NO: 120170 - DNA, 26 bp, Homo sapiens
taataggctggataatgaaaatgtgg

SEQ ID NO: 120171 - DNA, 26 bp, Homo sapiens
aataggctggataatgaaaatgtggt

SEQ ID NO: 120172 - DNA, 26 bp, Homo sapiens
ataggctggataatgaaaatgtggta

SEQ ID NO: 120173 - DNA, 26 bp, Homo sapiens
taggctggataatgaaaatgtggtat

SEQ ID NO: 120174 - DNA, 26 bp, Homo sapiens
aggctggataatgaaaatgtggtata

SEQ ID NO: 120175 - DNA, 26 bp, Homo sapiens
ggctggataatgaaaatgtggtatat

SEQ ID NO: 120176 - DNA, 26 bp, Homo sapiens
gctggataatgaaaatgtggtatata

SEQ ID NO: 120177 - DNA, 26 bp, Homo sapiens
ctggataatgaaaatgtggtatatac

SEQ ID NO: 120178 - DNA, 26 bp, Homo sapiens
tggataatgaaaatgtggtatataca

SEQ ID NO: 120179 - DNA, 26 bp, Homo sapiens
ggataatgaaaatgtggtatatacaa

SEQ ID NO: 120180 - DNA, 26 bp, Homo sapiens
gataatgaaaatgtggtatatacaaa

SEQ ID NO: 120181 - DNA, 26 bp, Homo sapiens
ataatgaaaatgtggtatatacaaac

SEQ ID NO: 120182 - DNA, 26 bp, Homo sapiens
taatgaaaatgtggtatatacaaaca

SEQ ID NO: 120183 - DNA, 26 bp, Homo sapiens
aatgaaaatgtggtatatacaaacac

SEQ ID NO: 120184 - DNA, 26 bp, Homo sapiens
atgaaaatgtggtatatacaaacacc

SEQ ID NO: 120185 - DNA, 26 bp, Homo sapiens
tgaaaatgtggtatatacaaacacca

SEQ ID NO: 120186 - DNA, 26 bp, Homo sapiens
gaaaatgtggtatatacaaacaccat

SEQ ID NO: 120187 - DNA, 26 bp, Homo sapiens
aaaatgtggtatatacaaacaccatg

SEQ ID NO: 120188 - DNA, 26 bp, Homo sapiens
aaatgtggtatatacaaacaccatgg

SEQ ID NO: 120189 - DNA, 26 bp, Homo sapiens
aatgtggtatatacaaacaccatgga

SEQ ID NO: 120190 - DNA, 26 bp, Homo sapiens
atgtggtatatacaaacaccatggaa

SEQ ID NO: 120191 - DNA, 26 bp, Homo sapiens
tgtggtatatacaaacaccatggaat

SEQ ID NO: 120192 - DNA, 26 bp, Homo sapiens
gtggtatatacaaacaccatggaata

SEQ ID NO: 120193 - DNA, 26 bp, Homo sapiens
tggtatatacaaacaccatggaatac

SEQ ID NO: 120194 - DNA, 26 bp, Homo sapiens
ggtatatacaaacaccatggaatact

SEQ ID NO: 120195 - DNA, 26 bp, Homo sapiens
gtatatacaaacaccatggaatacta

SEQ ID NO: 120196 - DNA, 26 bp, Homo sapiens
tatatacaaacaccatggaatactat

SEQ ID NO: 120197 - DNA, 26 bp, Homo sapiens
atatacaaacaccatggaatactatg

SEQ ID NO: 120198 - DNA, 26 bp, Homo sapiens
tatacaaacaccatggaatactatgc

SEQ ID NO: 120199 - DNA, 26 bp, Homo sapiens
atacaaacaccatggaatactatgca

SEQ ID NO: 120200 - DNA, 26 bp, Homo sapiens
tacaaacaccatggaatactatgcag

SEQ ID NO: 120201 - DNA, 26 bp, Homo sapiens
acaaacaccatggaatactatgcagc

SEQ ID NO: 120202 - DNA, 26 bp, Homo sapiens
caaacaccatggaatactatgcagcc

SEQ ID NO: 120203 - DNA, 26 bp, Homo sapiens
aaacaccatggaatactatgcagcca

SEQ ID NO: 120204 - DNA, 26 bp, Homo sapiens
aacaccatggaatactatgcagccat

SEQ ID NO: 120205 - DNA, 26 bp, Homo sapiens
acaccatggaatactatgcagccata

SEQ ID NO: 120206 - DNA, 26 bp, Homo sapiens
caccatggaatactatgcagccataa

SEQ ID NO: 120207 - DNA, 26 bp, Homo sapiens
accatggaatactatgcagccataaa

SEQ ID NO: 120208 - DNA, 26 bp, Homo sapiens
ccatggaatactatgcagccataaaa

SEQ ID NO: 120209 - DNA, 26 bp, Homo sapiens
catggaatactatgcagccataaaaa

SEQ ID NO: 120210 - DNA, 26 bp, Homo sapiens
atggaatactatgcagccataaaaaa

SEQ ID NO: 120211 - DNA, 26 bp, Homo sapiens
tggaatactatgcagccataaaaaac

SEQ ID NO: 120212 - DNA, 26 bp, Homo sapiens
ggaatactatgcagccataaaaaaca

SEQ ID NO: 120213 - DNA, 26 bp, Homo sapiens
gaatactatgcagccataaaaaacaa

SEQ ID NO: 120214 - DNA, 26 bp, Homo sapiens
aatactatgcagccataaaaaacaac

SEQ ID NO: 120215 - DNA, 26 bp, Homo sapiens
atactatgcagccataaaaaacaaca

SEQ ID NO: 120216 - DNA, 26 bp, Homo sapiens
tactatgcagccataaaaaacaacaa

SEQ ID NO: 120217 - DNA, 26 bp, Homo sapiens
actatgcagccataaaaaacaacaag

SEQ ID NO: 120218 - DNA, 26 bp, Homo sapiens
ctatgcagccataaaaaacaacaaga

SEQ ID NO: 120219 - DNA, 26 bp, Homo sapiens
tatgcagccataaaaaacaacaagat

SEQ ID NO: 120220 - DNA, 26 bp, Homo sapiens
atgcagccataaaaaacaacaagatc

SEQ ID NO: 120221 - DNA, 26 bp, Homo sapiens
tgcagccataaaaaacaacaagatca

SEQ ID NO: 120222 - DNA, 26 bp, Homo sapiens
gcagccataaaaaacaacaagatcat

SEQ ID NO: 120223 - DNA, 26 bp, Homo sapiens
cagccataaaaaacaacaagatcatg

SEQ ID NO: 120224 - DNA, 26 bp, Homo sapiens
agccataaaaaacaacaagatcatgt

SEQ ID NO: 120225 - DNA, 26 bp, Homo sapiens
gccataaaaaacaacaagatcatgtc

SEQ ID NO: 120226 - DNA, 26 bp, Homo sapiens
ccataaaaaacaacaagatcatgtcc

SEQ ID NO: 120227 - DNA, 26 bp, Homo sapiens
cataaaaaacaacaagatcatgtcct

SEQ ID NO: 120228 - DNA, 26 bp, Homo sapiens
ataaaaaacaacaagatcatgtcctc

SEQ ID NO: 120229 - DNA, 26 bp, Homo sapiens
taaaaaacaacaagatcatgtcctct

SEQ ID NO: 120230 - DNA, 26 bp, Homo sapiens
aaaaaacaacaagatcatgtcctctg

SEQ ID NO: 120231 - DNA, 26 bp, Homo sapiens
aaaaacaacaagatcatgtcctctgt

SEQ ID NO: 120232 - DNA, 26 bp, Homo sapiens
aaaacaacaagatcatgtcctctgta

SEQ ID NO: 120233 - DNA, 26 bp, Homo sapiens
aaacaacaagatcatgtcctctgtag

SEQ ID NO: 120234 - DNA, 26 bp, Homo sapiens
aacaacaagatcatgtcctctgtagc

SEQ ID NO: 120235 - DNA, 26 bp, Homo sapiens
acaacaagatcatgtcctctgtagca

SEQ ID NO: 120236 - DNA, 26 bp, Homo sapiens
caacaagatcatgtcctctgtagcaa

SEQ ID NO: 120237 - DNA, 26 bp, Homo sapiens
aacaagatcatgtcctctgtagcaat

SEQ ID NO: 120238 - DNA, 26 bp, Homo sapiens
acaagatcatgtcctctgtagcaata

SEQ ID NO: 120239 - DNA, 26 bp, Homo sapiens
caagatcatgtcctctgtagcaatat

SEQ ID NO: 120240 - DNA, 26 bp, Homo sapiens
aagatcatgtcctctgtagcaatatg

SEQ ID NO: 120241 - DNA, 26 bp, Homo sapiens
agatcatgtcctctgtagcaatatgg

SEQ ID NO: 120242 - DNA, 26 bp, Homo sapiens
gatcatgtcctctgtagcaatatgga

SEQ ID NO: 120243 - DNA, 26 bp, Homo sapiens
atcatgtcctctgtagcaatatggat

SEQ ID NO: 120244 - DNA, 26 bp, Homo sapiens
tcatgtcctctgtagcaatatggatg

SEQ ID NO: 120245 - DNA, 26 bp, Homo sapiens
catgtcctctgtagcaatatggatgg

SEQ ID NO: 120246 - DNA, 26 bp, Homo sapiens
atgtcctctgtagcaatatggatgga

SEQ ID NO: 120247 - DNA, 26 bp, Homo sapiens
tgtcctctgtagcaatatggatggag

SEQ ID NO: 120248 - DNA, 26 bp, Homo sapiens
gtcctctgtagcaatatggatggagc

SEQ ID NO: 120249 - DNA, 26 bp, Homo sapiens
tcctctgtagcaatatggatggagct

SEQ ID NO: 120250 - DNA, 26 bp, Homo sapiens
cctctgtagcaatatggatggagctg

SEQ ID NO: 120251 - DNA, 26 bp, Homo sapiens
ctctgtagcaatatggatggagctgg

SEQ ID NO: 120252 - DNA, 26 bp, Homo sapiens
tctgtagcaatatggatggagctgga

SEQ ID NO: 120253 - DNA, 26 bp, Homo sapiens
ctgtagcaatatggatggagctggaa

SEQ ID NO: 120254 - DNA, 26 bp, Homo sapiens
tgtagcaatatggatggagctggaag

SEQ ID NO: 120255 - DNA, 26 bp, Homo sapiens
gtagcaatatggatggagctggaagc

SEQ ID NO: 120256 - DNA, 26 bp, Homo sapiens
tagcaatatggatggagctggaagcc

SEQ ID NO: 120257 - DNA, 26 bp, Homo sapiens
agcaatatggatggagctggaagcca

SEQ ID NO: 120258 - DNA, 26 bp, Homo sapiens
gcaatatggatggagctggaagccat

SEQ ID NO: 120259 - DNA, 26 bp, Homo sapiens
caatatggatggagctggaagccatt

SEQ ID NO: 120260 - DNA, 26 bp, Homo sapiens
aatatggatggagctggaagccatta

SEQ ID NO: 120261 - DNA, 26 bp, Homo sapiens
atatggatggagctggaagccattat

SEQ ID NO: 120262 - DNA, 26 bp, Homo sapiens
tatggatggagctggaagccattatc

SEQ ID NO: 120263 - DNA, 26 bp, Homo sapiens
atggatggagctggaagccattatca

SEQ ID NO: 120264 - DNA, 26 bp, Homo sapiens
tggatggagctggaagccattatcat

SEQ ID NO: 120265 - DNA, 26 bp, Homo sapiens
ggatggagctggaagccattatcata

SEQ ID NO: 120266 - DNA, 26 bp, Homo sapiens
gatggagctggaagccattatcataa

SEQ ID NO: 120267 - DNA, 26 bp, Homo sapiens
atggagctggaagccattatcataag

SEQ ID NO: 120268 - DNA, 26 bp, Homo sapiens
tggagctggaagccattatcataagc

SEQ ID NO: 120269 - DNA, 26 bp, Homo sapiens
ggagctggaagccattatcataagca

SEQ ID NO: 120270 - DNA, 26 bp, Homo sapiens
gagctggaagccattatcataagcaa

SEQ ID NO: 120271 - DNA, 26 bp, Homo sapiens
agctggaagccattatcataagcaaa

SEQ ID NO: 120272 - DNA, 26 bp, Homo sapiens
gctggaagccattatcataagcaaac

SEQ ID NO: 120273 - DNA, 26 bp, Homo sapiens
ctggaagccattatcataagcaaact

SEQ ID NO: 120274 - DNA, 26 bp, Homo sapiens
tggaagccattatcataagcaaacta

SEQ ID NO: 120275 - DNA, 26 bp, Homo sapiens
ggaagccattatcataagcaaactaa

SEQ ID NO: 120276 - DNA, 26 bp, Homo sapiens
gaagccattatcataagcaaactaac

SEQ ID NO: 120277 - DNA, 26 bp, Homo sapiens
aagccattatcataagcaaactaaca

SEQ ID NO: 120278 - DNA, 26 bp, Homo sapiens
agccattatcataagcaaactaacac

SEQ ID NO: 120279 - DNA, 26 bp, Homo sapiens
gccattatcataagcaaactaacaca

SEQ ID NO: 120280 - DNA, 26 bp, Homo sapiens
ccattatcataagcaaactaacacag

SEQ ID NO: 120281 - DNA, 26 bp, Homo sapiens
cattatcataagcaaactaacacagg

SEQ ID NO: 120282 - DNA, 26 bp, Homo sapiens
attatcataagcaaactaacacagga

SEQ ID NO: 120283 - DNA, 26 bp, Homo sapiens
ttatcataagcaaactaacacaggaa

SEQ ID NO: 120284 - DNA, 26 bp, Homo sapiens
tatcataagcaaactaacacaggaac

SEQ ID NO: 120285 - DNA, 26 bp, Homo sapiens
atcataagcaaactaacacaggaaca

SEQ ID NO: 120286 - DNA, 26 bp, Homo sapiens
tcataagcaaactaacacaggaacag

SEQ ID NO: 120287 - DNA, 26 bp, Homo sapiens
cataagcaaactaacacaggaacaga

SEQ ID NO: 120288 - DNA, 26 bp, Homo sapiens
ataagcaaactaacacaggaacagaa

SEQ ID NO: 120289 - DNA, 26 bp, Homo sapiens
taagcaaactaacacaggaacagaaa

SEQ ID NO: 120290 - DNA, 26 bp, Homo sapiens
aagcaaactaacacaggaacagaaac

SEQ ID NO: 120291 - DNA, 26 bp, Homo sapiens
agcaaactaacacaggaacagaaacc

SEQ ID NO: 120292 - DNA, 26 bp, Homo sapiens
gcaaactaacacaggaacagaaaccc

SEQ ID NO: 120293 - DNA, 26 bp, Homo sapiens
caaactaacacaggaacagaaaccca

SEQ ID NO: 120294 - DNA, 26 bp, Homo sapiens
aaactaacacaggaacagaaacccaa

SEQ ID NO: 120295 - DNA, 26 bp, Homo sapiens
aactaacacaggaacagaaacccaaa

SEQ ID NO: 120296 - DNA, 26 bp, Homo sapiens
actaacacaggaacagaaacccaaat

SEQ ID NO: 120297 - DNA, 26 bp, Homo sapiens
ctaacacaggaacagaaacccaaata

SEQ ID NO: 120298 - DNA, 26 bp, Homo sapiens
taacacaggaacagaaacccaaatac

SEQ ID NO: 120299 - DNA, 26 bp, Homo sapiens
aacacaggaacagaaacccaaatacc

SEQ ID NO: 120300 - DNA, 26 bp, Homo sapiens
acacaggaacagaaacccaaatacca

SEQ ID NO: 120301 - DNA, 26 bp, Homo sapiens
cacaggaacagaaacccaaataccac

SEQ ID NO: 120302 - DNA, 26 bp, Homo sapiens
acaggaacagaaacccaaataccaca

SEQ ID NO: 120303 - DNA, 26 bp, Homo sapiens
caggaacagaaacccaaataccacat

SEQ ID NO: 120304 - DNA, 26 bp, Homo sapiens
aggaacagaaacccaaataccacatg

SEQ ID NO: 120305 - DNA, 26 bp, Homo sapiens
ggaacagaaacccaaataccacatgt

SEQ ID NO: 120306 - DNA, 26 bp, Homo sapiens
gaacagaaacccaaataccacatgtt

SEQ ID NO: 120307 - DNA, 26 bp, Homo sapiens
aacagaaacccaaataccacatgttc

SEQ ID NO: 120308 - DNA, 26 bp, Homo sapiens
acagaaacccaaataccacatgttct

SEQ ID NO: 120309 - DNA, 26 bp, Homo sapiens
cagaaacccaaataccacatgttctc

SEQ ID NO: 120310 - DNA, 26 bp, Homo sapiens
agaaacccaaataccacatgttctca

SEQ ID NO: 120311 - DNA, 26 bp, Homo sapiens
gaaacccaaataccacatgttctcac

SEQ ID NO: 120312 - DNA, 26 bp, Homo sapiens
aaacccaaataccacatgttctcact

SEQ ID NO: 120313 - DNA, 26 bp, Homo sapiens
aacccaaataccacatgttctcactt

SEQ ID NO: 120314 - DNA, 26 bp, Homo sapiens
acccaaataccacatgttctcactta

SEQ ID NO: 120315 - DNA, 26 bp, Homo sapiens
cccaaataccacatgttctcacttat

SEQ ID NO: 120316 - DNA, 26 bp, Homo sapiens
ccaaataccacatgttctcacttata

SEQ ID NO: 120317 - DNA, 26 bp, Homo sapiens
caaataccacatgttctcacttataa

SEQ ID NO: 120318 - DNA, 26 bp, Homo sapiens
aaataccacatgttctcacttataaa

SEQ ID NO: 120319 - DNA, 26 bp, Homo sapiens
aataccacatgttctcacttataaat

SEQ ID NO: 120320 - DNA, 26 bp, Homo sapiens
ataccacatgttctcacttataaatg

SEQ ID NO: 120321 - DNA, 26 bp, Homo sapiens
taccacatgttctcacttataaatgg

SEQ ID NO: 120322 - DNA, 26 bp, Homo sapiens
accacatgttctcacttataaatggg

SEQ ID NO: 120323 - DNA, 26 bp, Homo sapiens
ccacatgttctcacttataaatgggg

SEQ ID NO: 120324 - DNA, 26 bp, Homo sapiens
cacatgttctcacttataaatggggg

SEQ ID NO: 120325 - DNA, 26 bp, Homo sapiens
acatgttctcacttataaatgggggc

SEQ ID NO: 120326 - DNA, 26 bp, Homo sapiens
catgttctcacttataaatgggggcc

SEQ ID NO: 120327 - DNA, 26 bp, Homo sapiens
atgttctcacttataaatgggggcca

SEQ ID NO: 120328 - DNA, 26 bp, Homo sapiens
tgttctcacttataaatgggggccaa

SEQ ID NO: 120329 - DNA, 26 bp, Homo sapiens
gttctcacttataaatgggggccaaa

SEQ ID NO: 120330 - DNA, 26 bp, Homo sapiens
ttctcacttataaatgggggccaaac

SEQ ID NO: 120331 - DNA, 26 bp, Homo sapiens
tctcacttataaatgggggccaaaca

SEQ ID NO: 120332 - DNA, 26 bp, Homo sapiens
ctcacttataaatgggggccaaacaa

SEQ ID NO: 120333 - DNA, 26 bp, Homo sapiens
tcacttataaatgggggccaaacaaa

SEQ ID NO: 120334 - DNA, 26 bp, Homo sapiens
cacttataaatgggggccaaacaaag

SEQ ID NO: 120335 - DNA, 26 bp, Homo sapiens
acttataaatgggggccaaacaaaga

SEQ ID NO: 120336 - DNA, 26 bp, Homo sapiens
cttataaatgggggccaaacaaagag

SEQ ID NO: 120337 - DNA, 26 bp, Homo sapiens
ttataaatgggggccaaacaaagaga

SEQ ID NO: 120338 - DNA, 26 bp, Homo sapiens
tataaatgggggccaaacaaagagaa

SEQ ID NO: 120339 - DNA, 26 bp, Homo sapiens
ataaatgggggccaaacaaagagaac

SEQ ID NO: 120340 - DNA, 26 bp, Homo sapiens
taaatgggggccaaacaaagagaaca

SEQ ID NO: 120341 - DNA, 26 bp, Homo sapiens
aaatgggggccaaacaaagagaacac

SEQ ID NO: 120342 - DNA, 26 bp, Homo sapiens
aatgggggccaaacaaagagaacaca

SEQ ID NO: 120343 - DNA, 26 bp, Homo sapiens
atgggggccaaacaaagagaacacat

SEQ ID NO: 120344 - DNA, 26 bp, Homo sapiens
tgggggccaaacaaagagaacacatg

SEQ ID NO: 120345 - DNA, 26 bp, Homo sapiens
gggggccaaacaaagagaacacatgg

SEQ ID NO: 120346 - DNA, 26 bp, Homo sapiens
ggggccaaacaaagagaacacatgga

SEQ ID NO: 120347 - DNA, 26 bp, Homo sapiens
gggccaaacaaagagaacacatggat

SEQ ID NO: 120348 - DNA, 26 bp, Homo sapiens
ggccaaacaaagagaacacatggata

SEQ ID NO: 120349 - DNA, 26 bp, Homo sapiens
gccaaacaaagagaacacatggatac

SEQ ID NO: 120350 - DNA, 26 bp, Homo sapiens
ccaaacaaagagaacacatggatact

SEQ ID NO: 120351 - DNA, 26 bp, Homo sapiens
caaacaaagagaacacatggatactc

SEQ ID NO: 120352 - DNA, 26 bp, Homo sapiens
aaacaaagagaacacatggatactca

SEQ ID NO: 120353 - DNA, 26 bp, Homo sapiens
aacaaagagaacacatggatactcag

SEQ ID NO: 120354 - DNA, 26 bp, Homo sapiens
acaaagagaacacatggatactcaga

SEQ ID NO: 120355 - DNA, 26 bp, Homo sapiens
caaagagaacacatggatactcagag

SEQ ID NO: 120356 - DNA, 26 bp, Homo sapiens
aaagagaacacatggatactcagagg

SEQ ID NO: 120357 - DNA, 26 bp, Homo sapiens
aagagaacacatggatactcagagga

SEQ ID NO: 120358 - DNA, 26 bp, Homo sapiens
agagaacacatggatactcagaggag

SEQ ID NO: 120359 - DNA, 26 bp, Homo sapiens
gagaacacatggatactcagaggaga

SEQ ID NO: 120360 - DNA, 26 bp, Homo sapiens
agaacacatggatactcagaggagaa

SEQ ID NO: 120361 - DNA, 26 bp, Homo sapiens
gaacacatggatactcagaggagaac

SEQ ID NO: 120362 - DNA, 26 bp, Homo sapiens
aacacatggatactcagaggagaaca

SEQ ID NO: 120363 - DNA, 26 bp, Homo sapiens
acacatggatactcagaggagaacaa

SEQ ID NO: 120364 - DNA, 26 bp, Homo sapiens
cacatggatactcagaggagaacaag

SEQ ID NO: 120365 - DNA, 26 bp, Homo sapiens
acatggatactcagaggagaacaaga

SEQ ID NO: 120366 - DNA, 26 bp, Homo sapiens
catggatactcagaggagaacaagag

SEQ ID NO: 120367 - DNA, 26 bp, Homo sapiens
atggatactcagaggagaacaagaga

SEQ ID NO: 120368 - DNA, 26 bp, Homo sapiens
tggatactcagaggagaacaagagac

SEQ ID NO: 120369 - DNA, 26 bp, Homo sapiens
ggatactcagaggagaacaagagaca

SEQ ID NO: 120370 - DNA, 26 bp, Homo sapiens
gatactcagaggagaacaagagacac

SEQ ID NO: 120371 - DNA, 26 bp, Homo sapiens
atactcagaggagaacaagagacact

SEQ ID NO: 120372 - DNA, 26 bp, Homo sapiens
tactcagaggagaacaagagacactg

SEQ ID NO: 120373 - DNA, 26 bp, Homo sapiens
actcagaggagaacaagagacactgg

SEQ ID NO: 120374 - DNA, 26 bp, Homo sapiens
ctcagaggagaacaagagacactggg

SEQ ID NO: 120375 - DNA, 26 bp, Homo sapiens
tcagaggagaacaagagacactgggg

SEQ ID NO: 120376 - DNA, 26 bp, Homo sapiens
cagaggagaacaagagacactggggt

SEQ ID NO: 120377 - DNA, 26 bp, Homo sapiens
agaggagaacaagagacactggggtc

SEQ ID NO: 120378 - DNA, 26 bp, Homo sapiens
gaggagaacaagagacactggggtct

SEQ ID NO: 120379 - DNA, 26 bp, Homo sapiens
aggagaacaagagacactggggtcta

SEQ ID NO: 120380 - DNA, 26 bp, Homo sapiens
ggagaacaagagacactggggtctac

SEQ ID NO: 120381 - DNA, 26 bp, Homo sapiens
gagaacaagagacactggggtctact

SEQ ID NO: 120382 - DNA, 26 bp, Homo sapiens
agaacaagagacactggggtctactt

SEQ ID NO: 120383 - DNA, 26 bp, Homo sapiens
gaacaagagacactggggtctacttg

SEQ ID NO: 120384 - DNA, 26 bp, Homo sapiens
aacaagagacactggggtctacttga

SEQ ID NO: 120385 - DNA, 26 bp, Homo sapiens
acaagagacactggggtctacttgag

SEQ ID NO: 120386 - DNA, 26 bp, Homo sapiens
caagagacactggggtctacttgagg

SEQ ID NO: 120387 - DNA, 26 bp, Homo sapiens
aagagacactggggtctacttgaggg

SEQ ID NO: 120388 - DNA, 26 bp, Homo sapiens
agagacactggggtctacttgagggt

SEQ ID NO: 120389 - DNA, 26 bp, Homo sapiens
gagacactggggtctacttgagggtg

SEQ ID NO: 120390 - DNA, 26 bp, Homo sapiens
agacactggggtctacttgagggtgt

SEQ ID NO: 120391 - DNA, 26 bp, Homo sapiens
gacactggggtctacttgagggtgta

SEQ ID NO: 120392 - DNA, 26 bp, Homo sapiens
acactggggtctacttgagggtgtag

SEQ ID NO: 120393 - DNA, 26 bp, Homo sapiens
cactggggtctacttgagggtgtagg

SEQ ID NO: 120394 - DNA, 26 bp, Homo sapiens
actggggtctacttgagggtgtaggt

SEQ ID NO: 120395 - DNA, 26 bp, Homo sapiens
ctggggtctacttgagggtgtaggtt

SEQ ID NO: 120396 - DNA, 26 bp, Homo sapiens
tggggtctacttgagggtgtaggttg

SEQ ID NO: 120397 - DNA, 26 bp, Homo sapiens
ggggtctacttgagggtgtaggttgg

SEQ ID NO: 120398 - DNA, 26 bp, Homo sapiens
gggtctacttgagggtgtaggttggg

SEQ ID NO: 120399 - DNA, 26 bp, Homo sapiens
ggtctacttgagggtgtaggttggga

SEQ ID NO: 120400 - DNA, 26 bp, Homo sapiens
gtctacttgagggtgtaggttgggag

SEQ ID NO: 120401 - DNA, 26 bp, Homo sapiens
tctacttgagggtgtaggttgggagg

SEQ ID NO: 120402 - DNA, 26 bp, Homo sapiens
ctacttgagggtgtaggttgggagga

SEQ ID NO: 120403 - DNA, 26 bp, Homo sapiens
tacttgagggtgtaggttgggaggag

SEQ ID NO: 120404 - DNA, 26 bp, Homo sapiens
acttgagggtgtaggttgggaggagg

SEQ ID NO: 120405 - DNA, 26 bp, Homo sapiens
cttgagggtgtaggttgggaggaggg

SEQ ID NO: 120406 - DNA, 26 bp, Homo sapiens
ttgagggtgtaggttgggaggaggga

SEQ ID NO: 120407 - DNA, 26 bp, Homo sapiens
tgagggtgtaggttgggaggagggag

SEQ ID NO: 120408 - DNA, 26 bp, Homo sapiens
gagggtgtaggttgggaggagggaga

SEQ ID NO: 120409 - DNA, 26 bp, Homo sapiens
agggtgtaggttgggaggagggagaa

SEQ ID NO: 120410 - DNA, 26 bp, Homo sapiens
gggtgtaggttgggaggagggagaag

SEQ ID NO: 120411 - DNA, 26 bp, Homo sapiens
ggtgtaggttgggaggagggagaaga

SEQ ID NO: 120412 - DNA, 26 bp, Homo sapiens
gtgtaggttgggaggagggagaagat

SEQ ID NO: 120413 - DNA, 26 bp, Homo sapiens
tgtaggttgggaggagggagaagatc

SEQ ID NO: 120414 - DNA, 26 bp, Homo sapiens
gtaggttgggaggagggagaagatca

SEQ ID NO: 120415 - DNA, 26 bp, Homo sapiens
taggttgggaggagggagaagatcag

SEQ ID NO: 120416 - DNA, 26 bp, Homo sapiens
aggttgggaggagggagaagatcaga

SEQ ID NO: 120417 - DNA, 26 bp, Homo sapiens
ggttgggaggagggagaagatcagaa

SEQ ID NO: 120418 - DNA, 26 bp, Homo sapiens
gttgggaggagggagaagatcagaaa

SEQ ID NO: 120419 - DNA, 26 bp, Homo sapiens
ttgggaggagggagaagatcagaaaa

SEQ ID NO: 120420 - DNA, 26 bp, Homo sapiens
tgggaggagggagaagatcagaaaaa

SEQ ID NO: 120421 - DNA, 26 bp, Homo sapiens
gggaggagggagaagatcagaaaaaa

SEQ ID NO: 120422 - DNA, 26 bp, Homo sapiens
ggaggagggagaagatcagaaaaaaa

SEQ ID NO: 120423 - DNA, 26 bp, Homo sapiens
gaggagggagaagatcagaaaaaaac

SEQ ID NO: 120424 - DNA, 26 bp, Homo sapiens
aggagggagaagatcagaaaaaaacc

SEQ ID NO: 120425 - DNA, 26 bp, Homo sapiens
ggagggagaagatcagaaaaaaacct

SEQ ID NO: 120426 - DNA, 26 bp, Homo sapiens
gagggagaagatcagaaaaaaaccta

SEQ ID NO: 120427 - DNA, 26 bp, Homo sapiens
agggagaagatcagaaaaaaacctat

SEQ ID NO: 120428 - DNA, 26 bp, Homo sapiens
gggagaagatcagaaaaaaacctatt

SEQ ID NO: 120429 - DNA, 26 bp, Homo sapiens
ggagaagatcagaaaaaaacctattg

SEQ ID NO: 120430 - DNA, 26 bp, Homo sapiens
gagaagatcagaaaaaaacctattgg

SEQ ID NO: 120431 - DNA, 26 bp, Homo sapiens
agaagatcagaaaaaaacctattggg

SEQ ID NO: 120432 - DNA, 26 bp, Homo sapiens
gaagatcagaaaaaaacctattgggt

SEQ ID NO: 120433 - DNA, 26 bp, Homo sapiens
aagatcagaaaaaaacctattgggta

SEQ ID NO: 120434 - DNA, 26 bp, Homo sapiens
agatcagaaaaaaacctattgggtat

SEQ ID NO: 120435 - DNA, 26 bp, Homo sapiens
gatcagaaaaaaacctattgggtatt

SEQ ID NO: 120436 - DNA, 26 bp, Homo sapiens
atcagaaaaaaacctattgggtatta

SEQ ID NO: 120437 - DNA, 26 bp, Homo sapiens
tcagaaaaaaacctattgggtattat

SEQ ID NO: 120438 - DNA, 26 bp, Homo sapiens
cagaaaaaaacctattgggtattatg

SEQ ID NO: 120439 - DNA, 26 bp, Homo sapiens
agaaaaaaacctattgggtattatga

SEQ ID NO: 120440 - DNA, 26 bp, Homo sapiens
gaaaaaaacctattgggtattatgat

SEQ ID NO: 120441 - DNA, 26 bp, Homo sapiens
aaaaaaacctattgggtattatgatt

SEQ ID NO: 120442 - DNA, 26 bp, Homo sapiens
aaaaaacctattgggtattatgatta

SEQ ID NO: 120443 - DNA, 26 bp, Homo sapiens
aaaaacctattgggtattatgattaa

SEQ ID NO: 120444 - DNA, 26 bp, Homo sapiens
aaaacctattgggtattatgattaat

SEQ ID NO: 120445 - DNA, 26 bp, Homo sapiens
aaacctattgggtattatgattaata

SEQ ID NO: 120446 - DNA, 26 bp, Homo sapiens
aacctattgggtattatgattaataa

SEQ ID NO: 120447 - DNA, 26 bp, Homo sapiens
acctattgggtattatgattaataat

SEQ ID NO: 120448 - DNA, 26 bp, Homo sapiens
cctattgggtattatgattaataatt

SEQ ID NO: 120449 - DNA, 26 bp, Homo sapiens
ctattgggtattatgattaataattg

SEQ ID NO: 120450 - DNA, 26 bp, Homo sapiens
tattgggtattatgattaataattgt

SEQ ID NO: 120451 - DNA, 26 bp, Homo sapiens
attgggtattatgattaataattgtg

SEQ ID NO: 120452 - DNA, 26 bp, Homo sapiens
ttgggtattatgattaataattgtgt

SEQ ID NO: 120453 - DNA, 26 bp, Homo sapiens
tgggtattatgattaataattgtgtg

SEQ ID NO: 120454 - DNA, 26 bp, Homo sapiens
gggtattatgattaataattgtgtga

SEQ ID NO: 120455 - DNA, 26 bp, Homo sapiens
ggtattatgattaataattgtgtgat

SEQ ID NO: 120456 - DNA, 26 bp, Homo sapiens
gtattatgattaataattgtgtgata

SEQ ID NO: 120457 - DNA, 26 bp, Homo sapiens
tattatgattaataattgtgtgataa

SEQ ID NO: 120458 - DNA, 26 bp, Homo sapiens
attatgattaataattgtgtgataaa

SEQ ID NO: 120459 - DNA, 26 bp, Homo sapiens
ttatgattaataattgtgtgataaaa

SEQ ID NO: 120460 - DNA, 26 bp, Homo sapiens
tatgattaataattgtgtgataaaat

SEQ ID NO: 120461 - DNA, 26 bp, Homo sapiens
atgattaataattgtgtgataaaatt

SEQ ID NO: 120462 - DNA, 26 bp, Homo sapiens
tgattaataattgtgtgataaaatta

SEQ ID NO: 120463 - DNA, 26 bp, Homo sapiens
gattaataattgtgtgataaaattat

SEQ ID NO: 120464 - DNA, 26 bp, Homo sapiens
attaataattgtgtgataaaattatc

SEQ ID NO: 120465 - DNA, 26 bp, Homo sapiens
ttaataattgtgtgataaaattatct

SEQ ID NO: 120466 - DNA, 26 bp, Homo sapiens
taataattgtgtgataaaattatctg

SEQ ID NO: 120467 - DNA, 26 bp, Homo sapiens
aataattgtgtgataaaattatctgc

SEQ ID NO: 120468 - DNA, 26 bp, Homo sapiens
ataattgtgtgataaaattatctgca

SEQ ID NO: 120469 - DNA, 26 bp, Homo sapiens
taattgtgtgataaaattatctgcac

SEQ ID NO: 120470 - DNA, 26 bp, Homo sapiens
aattgtgtgataaaattatctgcaca

SEQ ID NO: 120471 - DNA, 26 bp, Homo sapiens
attgtgtgataaaattatctgcacac

SEQ ID NO: 120472 - DNA, 26 bp, Homo sapiens
ttgtgtgataaaattatctgcacacc

SEQ ID NO: 120473 - DNA, 26 bp, Homo sapiens
tgtgtgataaaattatctgcacacca

SEQ ID NO: 120474 - DNA, 26 bp, Homo sapiens
gtgtgataaaattatctgcacaccaa

SEQ ID NO: 120475 - DNA, 26 bp, Homo sapiens
tgtgataaaattatctgcacaccaaa

SEQ ID NO: 120476 - DNA, 26 bp, Homo sapiens
gtgataaaattatctgcacaccaaac

SEQ ID NO: 120477 - DNA, 26 bp, Homo sapiens
tgataaaattatctgcacaccaaacc

SEQ ID NO: 120478 - DNA, 26 bp, Homo sapiens
gataaaattatctgcacaccaaaccc

SEQ ID NO: 120479 - DNA, 26 bp, Homo sapiens
ataaaattatctgcacaccaaacccc

SEQ ID NO: 120480 - DNA, 26 bp, Homo sapiens
taaaattatctgcacaccaaaccccc

SEQ ID NO: 120481 - DNA, 26 bp, Homo sapiens
aaaattatctgcacaccaaaccccca

SEQ ID NO: 120482 - DNA, 26 bp, Homo sapiens
aaattatctgcacaccaaacccccat

SEQ ID NO: 120483 - DNA, 26 bp, Homo sapiens
aattatctgcacaccaaacccccatg

SEQ ID NO: 120484 - DNA, 26 bp, Homo sapiens
attatctgcacaccaaacccccatga

SEQ ID NO: 120485 - DNA, 26 bp, Homo sapiens
ttatctgcacaccaaacccccatgac

SEQ ID NO: 120486 - DNA, 26 bp, Homo sapiens
tatctgcacaccaaacccccatgaca

SEQ ID NO: 120487 - DNA, 26 bp, Homo sapiens
atctgcacaccaaacccccatgacat

SEQ ID NO: 120488 - DNA, 26 bp, Homo sapiens
tctgcacaccaaacccccatgacatg

SEQ ID NO: 120489 - DNA, 26 bp, Homo sapiens
ctgcacaccaaacccccatgacatgc

SEQ ID NO: 120490 - DNA, 26 bp, Homo sapiens
tgcacaccaaacccccatgacatgca

SEQ ID NO: 120491 - DNA, 26 bp, Homo sapiens
gcacaccaaacccccatgacatgcag

SEQ ID NO: 120492 - DNA, 26 bp, Homo sapiens
cacaccaaacccccatgacatgcagt

SEQ ID NO: 120493 - DNA, 26 bp, Homo sapiens
acaccaaacccccatgacatgcagtt

SEQ ID NO: 120494 - DNA, 26 bp, Homo sapiens
caccaaacccccatgacatgcagttt

SEQ ID NO: 120495 - DNA, 26 bp, Homo sapiens
accaaacccccatgacatgcagttta

SEQ ID NO: 120496 - DNA, 26 bp, Homo sapiens
ccaaacccccatgacatgcagtttac

SEQ ID NO: 120497 - DNA, 26 bp, Homo sapiens
caaacccccatgacatgcagtttacc

SEQ ID NO: 120498 - DNA, 26 bp, Homo sapiens
aaacccccatgacatgcagtttacct

SEQ ID NO: 120499 - DNA, 26 bp, Homo sapiens
aacccccatgacatgcagtttaccta

SEQ ID NO: 120500 - DNA, 26 bp, Homo sapiens
acccccatgacatgcagtttacctat

SEQ ID NO: 120501 - DNA, 26 bp, Homo sapiens
cccccatgacatgcagtttacctatg

SEQ ID NO: 120502 - DNA, 26 bp, Homo sapiens
ccccatgacatgcagtttacctatgt

SEQ ID NO: 120503 - DNA, 26 bp, Homo sapiens
cccatgacatgcagtttacctatgta

SEQ ID NO: 120504 - DNA, 26 bp, Homo sapiens
ccatgacatgcagtttacctatgtaa

SEQ ID NO: 120505 - DNA, 26 bp, Homo sapiens
catgacatgcagtttacctatgtaac

SEQ ID NO: 120506 - DNA, 26 bp, Homo sapiens
atgacatgcagtttacctatgtaaca

SEQ ID NO: 120507 - DNA, 26 bp, Homo sapiens
tgacatgcagtttacctatgtaacaa

SEQ ID NO: 120508 - DNA, 26 bp, Homo sapiens
gacatgcagtttacctatgtaacaaa

SEQ ID NO: 120509 - DNA, 26 bp, Homo sapiens
acatgcagtttacctatgtaacaaac

SEQ ID NO: 120510 - DNA, 26 bp, Homo sapiens
catgcagtttacctatgtaacaaacc

SEQ ID NO: 120511 - DNA, 26 bp, Homo sapiens
atgcagtttacctatgtaacaaacct

SEQ ID NO: 120512 - DNA, 26 bp, Homo sapiens
tgcagtttacctatgtaacaaacctg

SEQ ID NO: 120513 - DNA, 26 bp, Homo sapiens
gcagtttacctatgtaacaaacctgc

SEQ ID NO: 120514 - DNA, 26 bp, Homo sapiens
cagtttacctatgtaacaaacctgca

SEQ ID NO: 120515 - DNA, 26 bp, Homo sapiens
agtttacctatgtaacaaacctgcac

SEQ ID NO: 120516 - DNA, 26 bp, Homo sapiens
gtttacctatgtaacaaacctgcaca

SEQ ID NO: 120517 - DNA, 26 bp, Homo sapiens
tttacctatgtaacaaacctgcacat

SEQ ID NO: 120518 - DNA, 26 bp, Homo sapiens
ttacctatgtaacaaacctgcacata

SEQ ID NO: 120519 - DNA, 26 bp, Homo sapiens
tacctatgtaacaaacctgcacatat

SEQ ID NO: 120520 - DNA, 26 bp, Homo sapiens
acctatgtaacaaacctgcacatata

SEQ ID NO: 120521 - DNA, 26 bp, Homo sapiens
cctatgtaacaaacctgcacatatac

SEQ ID NO: 120522 - DNA, 26 bp, Homo sapiens
ctatgtaacaaacctgcacatatacc

SEQ ID NO: 120523 - DNA, 26 bp, Homo sapiens
tatgtaacaaacctgcacatataccc

SEQ ID NO: 120524 - DNA, 26 bp, Homo sapiens
atgtaacaaacctgcacatatacccc

SEQ ID NO: 120525 - DNA, 26 bp, Homo sapiens
tgtaacaaacctgcacatatacccct

SEQ ID NO: 120526 - DNA, 26 bp, Homo sapiens
gtaacaaacctgcacatatacccctg

SEQ ID NO: 120527 - DNA, 26 bp, Homo sapiens
taacaaacctgcacatatacccctga

SEQ ID NO: 120528 - DNA, 26 bp, Homo sapiens
aacaaacctgcacatatacccctgaa

SEQ ID NO: 120529 - DNA, 26 bp, Homo sapiens
acaaacctgcacatatacccctgaat

SEQ ID NO: 120530 - DNA, 26 bp, Homo sapiens
caaacctgcacatatacccctgaatc

SEQ ID NO: 120531 - DNA, 26 bp, Homo sapiens
aaacctgcacatatacccctgaatct

SEQ ID NO: 120532 - DNA, 26 bp, Homo sapiens
aacctgcacatatacccctgaatcta

SEQ ID NO: 120533 - DNA, 26 bp, Homo sapiens
acctgcacatatacccctgaatctaa

SEQ ID NO: 120534 - DNA, 26 bp, Homo sapiens
cctgcacatatacccctgaatctaaa

SEQ ID NO: 120535 - DNA, 26 bp, Homo sapiens
ctgcacatatacccctgaatctaaaa

SEQ ID NO: 120536 - DNA, 26 bp, Homo sapiens
tgcacatatacccctgaatctaaaat

SEQ ID NO: 120537 - DNA, 26 bp, Homo sapiens
gcacatatacccctgaatctaaaata

SEQ ID NO: 120538 - DNA, 26 bp, Homo sapiens
cacatatacccctgaatctaaaataa

SEQ ID NO: 120539 - DNA, 26 bp, Homo sapiens
acatatacccctgaatctaaaataaa

SEQ ID NO: 120540 - DNA, 26 bp, Homo sapiens
catatacccctgaatctaaaataaaa

SEQ ID NO: 120541 - DNA, 26 bp, Homo sapiens
atatacccctgaatctaaaataaaag

SEQ ID NO: 120542 - DNA, 26 bp, Homo sapiens
tatacccctgaatctaaaataaaagt

SEQ ID NO: 120543 - DNA, 26 bp, Homo sapiens
atacccctgaatctaaaataaaagtt

SEQ ID NO: 120544 - DNA, 26 bp, Homo sapiens
tacccctgaatctaaaataaaagtta

SEQ ID NO: 120545 - DNA, 26 bp, Homo sapiens
acccctgaatctaaaataaaagttaa

SEQ ID NO: 120546 - DNA, 26 bp, Homo sapiens
cccctgaatctaaaataaaagttaaa

SEQ ID NO: 120547 - DNA, 26 bp, Homo sapiens
ccctgaatctaaaataaaagttaaaa

SEQ ID NO: 120548 - DNA, 26 bp, Homo sapiens
cctgaatctaaaataaaagttaaaaa

SEQ ID NO: 120549 - DNA, 26 bp, Homo sapiens
ctgaatctaaaataaaagttaaaaaa

SEQ ID NO: 120550 - DNA, 26 bp, Homo sapiens
tgaatctaaaataaaagttaaaaaaa

SEQ ID NO: 120551 - DNA, 26 bp, Homo sapiens
gaatctaaaataaaagttaaaaaaat

SEQ ID NO: 120552 - DNA, 26 bp, Homo sapiens
aatctaaaataaaagttaaaaaaatt

SEQ ID NO: 120553 - DNA, 26 bp, Homo sapiens
atctaaaataaaagttaaaaaaatta

SEQ ID NO: 120554 - DNA, 26 bp, Homo sapiens
tctaaaataaaagttaaaaaaattaa

SEQ ID NO: 120555 - DNA, 26 bp, Homo sapiens
ctaaaataaaagttaaaaaaattaaa

SEQ ID NO: 120556 - DNA, 26 bp, Homo sapiens
taaaataaaagttaaaaaaattaaaa

SEQ ID NO: 120557 - DNA, 26 bp, Homo sapiens
aaaataaaagttaaaaaaattaaaaa

SEQ ID NO: 120558 - DNA, 26 bp, Homo sapiens
aaataaaagttaaaaaaattaaaaat

SEQ ID NO: 120559 - DNA, 26 bp, Homo sapiens
aataaaagttaaaaaaattaaaaatt

SEQ ID NO: 120560 - DNA, 26 bp, Homo sapiens
ataaaagttaaaaaaattaaaaattg

SEQ ID NO: 120561 - DNA, 26 bp, Homo sapiens
taaaagttaaaaaaattaaaaattgt

SEQ ID NO: 120562 - DNA, 26 bp, Homo sapiens
aaaagttaaaaaaattaaaaattgtg

SEQ ID NO: 120563 - DNA, 26 bp, Homo sapiens
aaagttaaaaaaattaaaaattgtgg

SEQ ID NO: 120564 - DNA, 26 bp, Homo sapiens
aagttaaaaaaattaaaaattgtgga

SEQ ID NO: 120565 - DNA, 26 bp, Homo sapiens
agttaaaaaaattaaaaattgtggag

SEQ ID NO: 120566 - DNA, 26 bp, Homo sapiens
gttaaaaaaattaaaaattgtggagc

SEQ ID NO: 120567 - DNA, 26 bp, Homo sapiens
ttaaaaaaattaaaaattgtggagct

SEQ ID NO: 120568 - DNA, 26 bp, Homo sapiens
taaaaaaattaaaaattgtggagctg

SEQ ID NO: 120569 - DNA, 26 bp, Homo sapiens
aaaaaaattaaaaattgtggagctgc

SEQ ID NO: 120570 - DNA, 26 bp, Homo sapiens
aaaaaattaaaaattgtggagctgct

SEQ ID NO: 120571 - DNA, 26 bp, Homo sapiens
aaaaattaaaaattgtggagctgctc

SEQ ID NO: 120572 - DNA, 26 bp, Homo sapiens
aaaattaaaaattgtggagctgctct

SEQ ID NO: 120573 - DNA, 26 bp, Homo sapiens
aaattaaaaattgtggagctgctctc

SEQ ID NO: 120574 - DNA, 26 bp, Homo sapiens
aattaaaaattgtggagctgctctct

SEQ ID NO: 120575 - DNA, 26 bp, Homo sapiens
attaaaaattgtggagctgctctctt

SEQ ID NO: 120576 - DNA, 26 bp, Homo sapiens
ttaaaaattgtggagctgctctcttc

SEQ ID NO: 120577 - DNA, 26 bp, Homo sapiens
taaaaattgtggagctgctctcttct

SEQ ID NO: 120578 - DNA, 26 bp, Homo sapiens
aaaaattgtggagctgctctcttctc

SEQ ID NO: 120579 - DNA, 26 bp, Homo sapiens
aaaattgtggagctgctctcttctca

SEQ ID NO: 120580 - DNA, 26 bp, Homo sapiens
aaattgtggagctgctctcttctcat

SEQ ID NO: 120581 - DNA, 26 bp, Homo sapiens
aattgtggagctgctctcttctcatt

SEQ ID NO: 120582 - DNA, 26 bp, Homo sapiens
attgtggagctgctctcttctcatta

SEQ ID NO: 120583 - DNA, 26 bp, Homo sapiens
ttgtggagctgctctcttctcattaa

SEQ ID NO: 120584 - DNA, 26 bp, Homo sapiens
tgtggagctgctctcttctcattaat

SEQ ID NO: 120585 - DNA, 26 bp, Homo sapiens
gtggagctgctctcttctcattaatc

SEQ ID NO: 120586 - DNA, 26 bp, Homo sapiens
tggagctgctctcttctcattaatcg

SEQ ID NO: 120587 - DNA, 26 bp, Homo sapiens
ggagctgctctcttctcattaatcgg

SEQ ID NO: 120588 - DNA, 26 bp, Homo sapiens
gagctgctctcttctcattaatcggc

SEQ ID NO: 120589 - DNA, 26 bp, Homo sapiens
agctgctctcttctcattaatcggca

SEQ ID NO: 120590 - DNA, 26 bp, Homo sapiens
gctgctctcttctcattaatcggcaa

SEQ ID NO: 120591 - DNA, 26 bp, Homo sapiens
ctgctctcttctcattaatcggcaag

SEQ ID NO: 120592 - DNA, 26 bp, Homo sapiens
tgctctcttctcattaatcggcaaga

SEQ ID NO: 120593 - DNA, 26 bp, Homo sapiens
gctctcttctcattaatcggcaagag

SEQ ID NO: 120594 - DNA, 26 bp, Homo sapiens
ctctcttctcattaatcggcaagagc

SEQ ID NO: 120595 - DNA, 26 bp, Homo sapiens
tctcttctcattaatcggcaagagct

SEQ ID NO: 120596 - DNA, 26 bp, Homo sapiens
ctcttctcattaatcggcaagagcta

SEQ ID NO: 120597 - DNA, 26 bp, Homo sapiens
tcttctcattaatcggcaagagctag

SEQ ID NO: 120598 - DNA, 26 bp, Homo sapiens
cttctcattaatcggcaagagctagt

SEQ ID NO: 120599 - DNA, 26 bp, Homo sapiens
ttctcattaatcggcaagagctagtc

SEQ ID NO: 120600 - DNA, 26 bp, Homo sapiens
tctcattaatcggcaagagctagtca

SEQ ID NO: 120601 - DNA, 26 bp, Homo sapiens
ctcattaatcggcaagagctagtcat

SEQ ID NO: 120602 - DNA, 26 bp, Homo sapiens
tcattaatcggcaagagctagtcata

SEQ ID NO: 120603 - DNA, 26 bp, Homo sapiens
cattaatcggcaagagctagtcataa

SEQ ID NO: 120604 - DNA, 26 bp, Homo sapiens
attaatcggcaagagctagtcataac

SEQ ID NO: 120605 - DNA, 26 bp, Homo sapiens
ttaatcggcaagagctagtcataact

SEQ ID NO: 120606 - DNA, 26 bp, Homo sapiens
taatcggcaagagctagtcataactg

SEQ ID NO: 120607 - DNA, 26 bp, Homo sapiens
aatcggcaagagctagtcataactga

SEQ ID NO: 120608 - DNA, 26 bp, Homo sapiens
atcggcaagagctagtcataactgaa

SEQ ID NO: 120609 - DNA, 26 bp, Homo sapiens
tcggcaagagctagtcataactgaaa

SEQ ID NO: 120610 - DNA, 26 bp, Homo sapiens
cggcaagagctagtcataactgaaat

SEQ ID NO: 120611 - DNA, 26 bp, Homo sapiens
ggcaagagctagtcataactgaaatt

SEQ ID NO: 120612 - DNA, 26 bp, Homo sapiens
gcaagagctagtcataactgaaatta

SEQ ID NO: 120613 - DNA, 26 bp, Homo sapiens
caagagctagtcataactgaaattat

SEQ ID NO: 120614 - DNA, 26 bp, Homo sapiens
aagagctagtcataactgaaattatt

SEQ ID NO: 120615 - DNA, 26 bp, Homo sapiens
agagctagtcataactgaaattattt

SEQ ID NO: 120616 - DNA, 26 bp, Homo sapiens
gagctagtcataactgaaattatttc

SEQ ID NO: 120617 - DNA, 26 bp, Homo sapiens
agctagtcataactgaaattatttct

SEQ ID NO: 120618 - DNA, 26 bp, Homo sapiens
gctagtcataactgaaattatttctg

SEQ ID NO: 120619 - DNA, 26 bp, Homo sapiens
ctagtcataactgaaattatttctgt

SEQ ID NO: 120620 - DNA, 26 bp, Homo sapiens
tagtcataactgaaattatttctgtg

SEQ ID NO: 120621 - DNA, 26 bp, Homo sapiens
agtcataactgaaattatttctgtga

SEQ ID NO: 120622 - DNA, 26 bp, Homo sapiens
gtcataactgaaattatttctgtgac

SEQ ID NO: 120623 - DNA, 26 bp, Homo sapiens
tcataactgaaattatttctgtgact

SEQ ID NO: 120624 - DNA, 26 bp, Homo sapiens
cataactgaaattatttctgtgacta

SEQ ID NO: 120625 - DNA, 26 bp, Homo sapiens
ataactgaaattatttctgtgactat

SEQ ID NO: 120626 - DNA, 26 bp, Homo sapiens
taactgaaattatttctgtgactata

SEQ ID NO: 120627 - DNA, 26 bp, Homo sapiens
aactgaaattatttctgtgactataa

SEQ ID NO: 120628 - DNA, 26 bp, Homo sapiens
actgaaattatttctgtgactataat

SEQ ID NO: 120629 - DNA, 26 bp, Homo sapiens
ctgaaattatttctgtgactataata

SEQ ID NO: 120630 - DNA, 26 bp, Homo sapiens
tgaaattatttctgtgactataatat

SEQ ID NO: 120631 - DNA, 26 bp, Homo sapiens
gaaattatttctgtgactataatata

SEQ ID NO: 120632 - DNA, 26 bp, Homo sapiens
aaattatttctgtgactataatataa

SEQ ID NO: 120633 - DNA, 26 bp, Homo sapiens
aattatttctgtgactataatataaa

SEQ ID NO: 120634 - DNA, 26 bp, Homo sapiens
attatttctgtgactataatataaat

SEQ ID NO: 120635 - DNA, 26 bp, Homo sapiens
ttatttctgtgactataatataaatt

SEQ ID NO: 120636 - DNA, 26 bp, Homo sapiens
tatttctgtgactataatataaattg

SEQ ID NO: 120637 - DNA, 26 bp, Homo sapiens
atttctgtgactataatataaattgc

SEQ ID NO: 120638 - DNA, 26 bp, Homo sapiens
tttctgtgactataatataaattgca

SEQ ID NO: 120639 - DNA, 26 bp, Homo sapiens
ttctgtgactataatataaattgcaa

SEQ ID NO: 120640 - DNA, 26 bp, Homo sapiens
tctgtgactataatataaattgcaaa

SEQ ID NO: 120641 - DNA, 26 bp, Homo sapiens
ctgtgactataatataaattgcaaat

SEQ ID NO: 120642 - DNA, 26 bp, Homo sapiens
tgtgactataatataaattgcaaatg

SEQ ID NO: 120643 - DNA, 26 bp, Homo sapiens
gtgactataatataaattgcaaatgg

SEQ ID NO: 120644 - DNA, 26 bp, Homo sapiens
tgactataatataaattgcaaatggt

SEQ ID NO: 120645 - DNA, 26 bp, Homo sapiens
gactataatataaattgcaaatggtt

SEQ ID NO: 120646 - DNA, 26 bp, Homo sapiens
actataatataaattgcaaatggtta

SEQ ID NO: 120647 - DNA, 26 bp, Homo sapiens
ctataatataaattgcaaatggttaa

SEQ ID NO: 120648 - DNA, 26 bp, Homo sapiens
tataatataaattgcaaatggttaat

SEQ ID NO: 120649 - DNA, 26 bp, Homo sapiens
ataatataaattgcaaatggttaatg

SEQ ID NO: 120650 - DNA, 26 bp, Homo sapiens
taatataaattgcaaatggttaatgg

SEQ ID NO: 120651 - DNA, 26 bp, Homo sapiens
aatataaattgcaaatggttaatggc

SEQ ID NO: 120652 - DNA, 26 bp, Homo sapiens
atataaattgcaaatggttaatggct

SEQ ID NO: 120653 - DNA, 26 bp, Homo sapiens
tataaattgcaaatggttaatggctt

SEQ ID NO: 120654 - DNA, 26 bp, Homo sapiens
ataaattgcaaatggttaatggcttc

SEQ ID NO: 120655 - DNA, 26 bp, Homo sapiens
taaattgcaaatggttaatggcttct

SEQ ID NO: 120656 - DNA, 26 bp, Homo sapiens
aaattgcaaatggttaatggcttctt

SEQ ID NO: 120657 - DNA, 26 bp, Homo sapiens
aattgcaaatggttaatggcttctta

SEQ ID NO: 120658 - DNA, 26 bp, Homo sapiens
attgcaaatggttaatggcttcttaa

SEQ ID NO: 120659 - DNA, 26 bp, Homo sapiens
ttgcaaatggttaatggcttcttaat

SEQ ID NO: 120660 - DNA, 26 bp, Homo sapiens
tgcaaatggttaatggcttcttaatc

SEQ ID NO: 120661 - DNA, 26 bp, Homo sapiens
gcaaatggttaatggcttcttaatct

SEQ ID NO: 120662 - DNA, 26 bp, Homo sapiens
caaatggttaatggcttcttaatctt

SEQ ID NO: 120663 - DNA, 26 bp, Homo sapiens
aaatggttaatggcttcttaatctta

SEQ ID NO: 120664 - DNA, 26 bp, Homo sapiens
aatggttaatggcttcttaatcttac

SEQ ID NO: 120665 - DNA, 26 bp, Homo sapiens
atggttaatggcttcttaatcttacc

SEQ ID NO: 120666 - DNA, 26 bp, Homo sapiens
tggttaatggcttcttaatcttacca

SEQ ID NO: 120667 - DNA, 26 bp, Homo sapiens
ggttaatggcttcttaatcttaccag

SEQ ID NO: 120668 - DNA, 26 bp, Homo sapiens
gttaatggcttcttaatcttaccagt

SEQ ID NO: 120669 - DNA, 26 bp, Homo sapiens
ttaatggcttcttaatcttaccagtt

SEQ ID NO: 120670 - DNA, 26 bp, Homo sapiens
taatggcttcttaatcttaccagttg

SEQ ID NO: 120671 - DNA, 26 bp, Homo sapiens
aatggcttcttaatcttaccagttgt

SEQ ID NO: 120672 - DNA, 26 bp, Homo sapiens
atggcttcttaatcttaccagttgtc

SEQ ID NO: 120673 - DNA, 26 bp, Homo sapiens
tggcttcttaatcttaccagttgtct

SEQ ID NO: 120674 - DNA, 26 bp, Homo sapiens
ggcttcttaatcttaccagttgtctt

SEQ ID NO: 120675 - DNA, 26 bp, Homo sapiens
gcttcttaatcttaccagttgtcttt

SEQ ID NO: 120676 - DNA, 26 bp, Homo sapiens
cttcttaatcttaccagttgtctttt

SEQ ID NO: 120677 - DNA, 26 bp, Homo sapiens
ttcttaatcttaccagttgtcttttt

SEQ ID NO: 120678 - DNA, 26 bp, Homo sapiens
tcttaatcttaccagttgtctttttg

SEQ ID NO: 120679 - DNA, 26 bp, Homo sapiens
cttaatcttaccagttgtctttttgc

SEQ ID NO: 120680 - DNA, 26 bp, Homo sapiens
ttaatcttaccagttgtctttttgct

SEQ ID NO: 120681 - DNA, 26 bp, Homo sapiens
taatcttaccagttgtctttttgctt

SEQ ID NO: 120682 - DNA, 26 bp, Homo sapiens
aatcttaccagttgtctttttgcttt

SEQ ID NO: 120683 - DNA, 26 bp, Homo sapiens
atcttaccagttgtctttttgctttc

SEQ ID NO: 120684 - DNA, 26 bp, Homo sapiens
tcttaccagttgtctttttgctttcc

SEQ ID NO: 120685 - DNA, 26 bp, Homo sapiens
cttaccagttgtctttttgctttcct

SEQ ID NO: 120686 - DNA, 26 bp, Homo sapiens
ttaccagttgtctttttgctttcctt

SEQ ID NO: 120687 - DNA, 26 bp, Homo sapiens
taccagttgtctttttgctttcctta

SEQ ID NO: 120688 - DNA, 26 bp, Homo sapiens
accagttgtctttttgctttccttaa

SEQ ID NO: 120689 - DNA, 26 bp, Homo sapiens
ccagttgtctttttgctttccttaaa

SEQ ID NO: 120690 - DNA, 26 bp, Homo sapiens
cagttgtctttttgctttccttaaat

SEQ ID NO: 120691 - DNA, 26 bp, Homo sapiens
agttgtctttttgctttccttaaatc

SEQ ID NO: 120692 - DNA, 26 bp, Homo sapiens
gttgtctttttgctttccttaaatct

SEQ ID NO: 120693 - DNA, 26 bp, Homo sapiens
ttgtctttttgctttccttaaatctt

SEQ ID NO: 120694 - DNA, 26 bp, Homo sapiens
tgtctttttgctttccttaaatcttt

SEQ ID NO: 120695 - DNA, 26 bp, Homo sapiens
gtctttttgctttccttaaatctttt

SEQ ID NO: 120696 - DNA, 26 bp, Homo sapiens
tctttttgctttccttaaatcttttc

SEQ ID NO: 120697 - DNA, 26 bp, Homo sapiens
ctttttgctttccttaaatcttttct

SEQ ID NO: 120698 - DNA, 26 bp, Homo sapiens
tttttgctttccttaaatcttttcta

SEQ ID NO: 120699 - DNA, 26 bp, Homo sapiens
ttttgctttccttaaatcttttctag

SEQ ID NO: 120700 - DNA, 26 bp, Homo sapiens
tttgctttccttaaatcttttctagg

SEQ ID NO: 120701 - DNA, 26 bp, Homo sapiens
ttgctttccttaaatcttttctagga

SEQ ID NO: 120702 - DNA, 26 bp, Homo sapiens
tgctttccttaaatcttttctaggaa

SEQ ID NO: 120703 - DNA, 26 bp, Homo sapiens
gctttccttaaatcttttctaggaat

SEQ ID NO: 120704 - DNA, 26 bp, Homo sapiens
ctttccttaaatcttttctaggaata

SEQ ID NO: 120705 - DNA, 26 bp, Homo sapiens
tttccttaaatcttttctaggaataa

SEQ ID NO: 120706 - DNA, 26 bp, Homo sapiens
ttccttaaatcttttctaggaataat

SEQ ID NO: 120707 - DNA, 26 bp, Homo sapiens
tccttaaatcttttctaggaataatg

SEQ ID NO: 120708 - DNA, 26 bp, Homo sapiens
ccttaaatcttttctaggaataatgt

SEQ ID NO: 120709 - DNA, 26 bp, Homo sapiens
cttaaatcttttctaggaataatgtc

SEQ ID NO: 120710 - DNA, 26 bp, Homo sapiens
ttaaatcttttctaggaataatgtca

SEQ ID NO: 120711 - DNA, 26 bp, Homo sapiens
taaatcttttctaggaataatgtcac

SEQ ID NO: 120712 - DNA, 26 bp, Homo sapiens
aaatcttttctaggaataatgtcact

SEQ ID NO: 120713 - DNA, 26 bp, Homo sapiens
aatcttttctaggaataatgtcacta

SEQ ID NO: 120714 - DNA, 26 bp, Homo sapiens
atcttttctaggaataatgtcactac

SEQ ID NO: 120715 - DNA, 26 bp, Homo sapiens
tcttttctaggaataatgtcactact

SEQ ID NO: 120716 - DNA, 26 bp, Homo sapiens
cttttctaggaataatgtcactactt

SEQ ID NO: 120717 - DNA, 26 bp, Homo sapiens
ttttctaggaataatgtcactacttc

SEQ ID NO: 120718 - DNA, 26 bp, Homo sapiens
tttctaggaataatgtcactacttct

SEQ ID NO: 120719 - DNA, 26 bp, Homo sapiens
ttctaggaataatgtcactacttctg

SEQ ID NO: 120720 - DNA, 26 bp, Homo sapiens
tctaggaataatgtcactacttctga

SEQ ID NO: 120721 - DNA, 26 bp, Homo sapiens
ctaggaataatgtcactacttctgac

SEQ ID NO: 120722 - DNA, 26 bp, Homo sapiens
taggaataatgtcactacttctgact

SEQ ID NO: 120723 - DNA, 26 bp, Homo sapiens
aggaataatgtcactacttctgactt

SEQ ID NO: 120724 - DNA, 26 bp, Homo sapiens
ggaataatgtcactacttctgacttg

SEQ ID NO: 120725 - DNA, 26 bp, Homo sapiens
gaataatgtcactacttctgacttgt

SEQ ID NO: 120726 - DNA, 26 bp, Homo sapiens
aataatgtcactacttctgacttgtt

SEQ ID NO: 120727 - DNA, 26 bp, Homo sapiens
ataatgtcactacttctgacttgttt

SEQ ID NO: 120728 - DNA, 26 bp, Homo sapiens
taatgtcactacttctgacttgtttc

SEQ ID NO: 120729 - DNA, 26 bp, Homo sapiens
aatgtcactacttctgacttgtttcc

SEQ ID NO: 120730 - DNA, 26 bp, Homo sapiens
atgtcactacttctgacttgtttccc

SEQ ID NO: 120731 - DNA, 26 bp, Homo sapiens
tgtcactacttctgacttgtttccca

SEQ ID NO: 120732 - DNA, 26 bp, Homo sapiens
gtcactacttctgacttgtttcccat

SEQ ID NO: 120733 - DNA, 26 bp, Homo sapiens
tcactacttctgacttgtttcccatg

SEQ ID NO: 120734 - DNA, 26 bp, Homo sapiens
cactacttctgacttgtttcccatgt

SEQ ID NO: 120735 - DNA, 26 bp, Homo sapiens
actacttctgacttgtttcccatgtt

SEQ ID NO: 120736 - DNA, 26 bp, Homo sapiens
ctacttctgacttgtttcccatgttt

SEQ ID NO: 120737 - DNA, 26 bp, Homo sapiens
tacttctgacttgtttcccatgttta

SEQ ID NO: 120738 - DNA, 26 bp, Homo sapiens
acttctgacttgtttcccatgtttat

SEQ ID NO: 120739 - DNA, 26 bp, Homo sapiens
cttctgacttgtttcccatgtttata

SEQ ID NO: 120740 - DNA, 26 bp, Homo sapiens
ttctgacttgtttcccatgtttataa

SEQ ID NO: 120741 - DNA, 26 bp, Homo sapiens
tctgacttgtttcccatgtttataaa

SEQ ID NO: 120742 - DNA, 26 bp, Homo sapiens
ctgacttgtttcccatgtttataaat

SEQ ID NO: 120743 - DNA, 26 bp, Homo sapiens
tgacttgtttcccatgtttataaatt

SEQ ID NO: 120744 - DNA, 26 bp, Homo sapiens
gacttgtttcccatgtttataaatta

SEQ ID NO: 120745 - DNA, 26 bp, Homo sapiens
acttgtttcccatgtttataaattat

SEQ ID NO: 120746 - DNA, 26 bp, Homo sapiens
cttgtttcccatgtttataaattatt

SEQ ID NO: 120747 - DNA, 26 bp, Homo sapiens
ttgtttcccatgtttataaattatta

SEQ ID NO: 120748 - DNA, 26 bp, Homo sapiens
tgtttcccatgtttataaattattag

SEQ ID NO: 120749 - DNA, 26 bp, Homo sapiens
gtttcccatgtttataaattattagt

SEQ ID NO: 120750 - DNA, 26 bp, Homo sapiens
tttcccatgtttataaattattagtt

SEQ ID NO: 120751 - DNA, 26 bp, Homo sapiens
ttcccatgtttataaattattagttc

SEQ ID NO: 120752 - DNA, 26 bp, Homo sapiens
tcccatgtttataaattattagttca

SEQ ID NO: 120753 - DNA, 26 bp, Homo sapiens
cccatgtttataaattattagttcaa

SEQ ID NO: 120754 - DNA, 26 bp, Homo sapiens
ccatgtttataaattattagttcaat

SEQ ID NO: 120755 - DNA, 26 bp, Homo sapiens
catgtttataaattattagttcaatc

SEQ ID NO: 120756 - DNA, 26 bp, Homo sapiens
atgtttataaattattagttcaatca

SEQ ID NO: 120757 - DNA, 26 bp, Homo sapiens
tgtttataaattattagttcaatcaa

SEQ ID NO: 120758 - DNA, 26 bp, Homo sapiens
gtttataaattattagttcaatcaaa

SEQ ID NO: 120759 - DNA, 26 bp, Homo sapiens
tttataaattattagttcaatcaaaa

SEQ ID NO: 120760 - DNA, 26 bp, Homo sapiens
ttataaattattagttcaatcaaaat

SEQ ID NO: 120761 - DNA, 26 bp, Homo sapiens
tataaattattagttcaatcaaaatt

SEQ ID NO: 120762 - DNA, 26 bp, Homo sapiens
ataaattattagttcaatcaaaatta

SEQ ID NO: 120763 - DNA, 26 bp, Homo sapiens
taaattattagttcaatcaaaattaa

SEQ ID NO: 120764 - DNA, 26 bp, Homo sapiens
aaattattagttcaatcaaaattaag

SEQ ID NO: 120765 - DNA, 26 bp, Homo sapiens
aattattagttcaatcaaaattaagt

SEQ ID NO: 120766 - DNA, 26 bp, Homo sapiens
attattagttcaatcaaaattaagtt

SEQ ID NO: 120767 - DNA, 26 bp, Homo sapiens
ttattagttcaatcaaaattaagttt

SEQ ID NO: 120768 - DNA, 26 bp, Homo sapiens
tattagttcaatcaaaattaagtttg

SEQ ID NO: 120769 - DNA, 26 bp, Homo sapiens
attagttcaatcaaaattaagtttgt

SEQ ID NO: 120770 - DNA, 26 bp, Homo sapiens
ttagttcaatcaaaattaagtttgtt

SEQ ID NO: 120771 - DNA, 26 bp, Homo sapiens
tagttcaatcaaaattaagtttgttt

SEQ ID NO: 120772 - DNA, 26 bp, Homo sapiens
agttcaatcaaaattaagtttgtttt

SEQ ID NO: 120773 - DNA, 26 bp, Homo sapiens
gttcaatcaaaattaagtttgttttt

SEQ ID NO: 120774 - DNA, 26 bp, Homo sapiens
ttcaatcaaaattaagtttgtttttt

SEQ ID NO: 120775 - DNA, 26 bp, Homo sapiens
tcaatcaaaattaagtttgttttttg

SEQ ID NO: 120776 - DNA, 26 bp, Homo sapiens
caatcaaaattaagtttgttttttgt

SEQ ID NO: 120777 - DNA, 26 bp, Homo sapiens
aatcaaaattaagtttgttttttgtg

SEQ ID NO: 120778 - DNA, 26 bp, Homo sapiens
atcaaaattaagtttgttttttgtgg

SEQ ID NO: 120779 - DNA, 26 bp, Homo sapiens
tcaaaattaagtttgttttttgtgga

SEQ ID NO: 120780 - DNA, 26 bp, Homo sapiens
caaaattaagtttgttttttgtggat

SEQ ID NO: 120781 - DNA, 26 bp, Homo sapiens
aaaattaagtttgttttttgtggatg

SEQ ID NO: 120782 - DNA, 26 bp, Homo sapiens
aaattaagtttgttttttgtggatgt

SEQ ID NO: 120783 - DNA, 26 bp, Homo sapiens
aattaagtttgttttttgtggatgtc

SEQ ID NO: 120784 - DNA, 26 bp, Homo sapiens
attaagtttgttttttgtggatgtca

SEQ ID NO: 120785 - DNA, 26 bp, Homo sapiens
ttaagtttgttttttgtggatgtcag

SEQ ID NO: 120786 - DNA, 26 bp, Homo sapiens
taagtttgttttttgtggatgtcagg

SEQ ID NO: 120787 - DNA, 26 bp, Homo sapiens
aagtttgttttttgtggatgtcaggc

SEQ ID NO: 120788 - DNA, 26 bp, Homo sapiens
agtttgttttttgtggatgtcaggcc

SEQ ID NO: 120789 - DNA, 26 bp, Homo sapiens
gtttgttttttgtggatgtcaggccc

SEQ ID NO: 120790 - DNA, 26 bp, Homo sapiens
tttgttttttgtggatgtcaggccct

SEQ ID NO: 120791 - DNA, 26 bp, Homo sapiens
ttgttttttgtggatgtcaggccctg

SEQ ID NO: 120792 - DNA, 26 bp, Homo sapiens
tgttttttgtggatgtcaggccctga

SEQ ID NO: 120793 - DNA, 26 bp, Homo sapiens
gttttttgtggatgtcaggccctgat

SEQ ID NO: 120794 - DNA, 26 bp, Homo sapiens
ttttttgtggatgtcaggccctgata

SEQ ID NO: 120795 - DNA, 26 bp, Homo sapiens
tttttgtggatgtcaggccctgatat

SEQ ID NO: 120796 - DNA, 26 bp, Homo sapiens
ttttgtggatgtcaggccctgatatt

SEQ ID NO: 120797 - DNA, 26 bp, Homo sapiens
tttgtggatgtcaggccctgatattc

SEQ ID NO: 120798 - DNA, 26 bp, Homo sapiens
ttgtggatgtcaggccctgatattct

SEQ ID NO: 120799 - DNA, 26 bp, Homo sapiens
tgtggatgtcaggccctgatattctt

SEQ ID NO: 120800 - DNA, 26 bp, Homo sapiens
gtggatgtcaggccctgatattcttt

SEQ ID NO: 120801 - DNA, 26 bp, Homo sapiens
tggatgtcaggccctgatattctttg

SEQ ID NO: 120802 - DNA, 26 bp, Homo sapiens
ggatgtcaggccctgatattctttga

SEQ ID NO: 120803 - DNA, 26 bp, Homo sapiens
gatgtcaggccctgatattctttgat

SEQ ID NO: 120804 - DNA, 26 bp, Homo sapiens
atgtcaggccctgatattctttgata

SEQ ID NO: 120805 - DNA, 26 bp, Homo sapiens
tgtcaggccctgatattctttgataa

SEQ ID NO: 120806 - DNA, 26 bp, Homo sapiens
gtcaggccctgatattctttgataat

SEQ ID NO: 120807 - DNA, 26 bp, Homo sapiens
tcaggccctgatattctttgataatc

SEQ ID NO: 120808 - DNA, 26 bp, Homo sapiens
caggccctgatattctttgataatca

SEQ ID NO: 120809 - DNA, 26 bp, Homo sapiens
aggccctgatattctttgataatcac

SEQ ID NO: 120810 - DNA, 26 bp, Homo sapiens
ggccctgatattctttgataatcact

SEQ ID NO: 120811 - DNA, 26 bp, Homo sapiens
gccctgatattctttgataatcactt

SEQ ID NO: 120812 - DNA, 26 bp, Homo sapiens
ccctgatattctttgataatcacttt

SEQ ID NO: 120813 - DNA, 26 bp, Homo sapiens
cctgatattctttgataatcactttt

SEQ ID NO: 120814 - DNA, 26 bp, Homo sapiens
ctgatattctttgataatcacttttt

SEQ ID NO: 120815 - DNA, 26 bp, Homo sapiens
tgatattctttgataatcacttttta

SEQ ID NO: 120816 - DNA, 26 bp, Homo sapiens
gatattctttgataatcactttttaa

SEQ ID NO: 120817 - DNA, 26 bp, Homo sapiens
atattctttgataatcactttttaat

SEQ ID NO: 120818 - DNA, 26 bp, Homo sapiens
tattctttgataatcactttttaatt

SEQ ID NO: 120819 - DNA, 26 bp, Homo sapiens
attctttgataatcactttttaattt

SEQ ID NO: 120820 - DNA, 26 bp, Homo sapiens
ttctttgataatcactttttaatttt

SEQ ID NO: 120821 - DNA, 26 bp, Homo sapiens
tctttgataatcactttttaatttta

SEQ ID NO: 120822 - DNA, 26 bp, Homo sapiens
ctttgataatcactttttaattttaa

SEQ ID NO: 120823 - DNA, 26 bp, Homo sapiens
tttgataatcactttttaattttaaa

SEQ ID NO: 120824 - DNA, 26 bp, Homo sapiens
ttgataatcactttttaattttaaac

SEQ ID NO: 120825 - DNA, 26 bp, Homo sapiens
tgataatcactttttaattttaaact

SEQ ID NO: 120826 - DNA, 26 bp, Homo sapiens
gataatcactttttaattttaaactt

SEQ ID NO: 120827 - DNA, 26 bp, Homo sapiens
ataatcactttttaattttaaacttt

SEQ ID NO: 120828 - DNA, 26 bp, Homo sapiens
taatcactttttaattttaaactttt

SEQ ID NO: 120829 - DNA, 26 bp, Homo sapiens
aatcactttttaattttaaacttttc

SEQ ID NO: 120830 - DNA, 26 bp, Homo sapiens
atcactttttaattttaaacttttct

SEQ ID NO: 120831 - DNA, 26 bp, Homo sapiens
tcactttttaattttaaacttttctt

SEQ ID NO: 120832 - DNA, 26 bp, Homo sapiens
cactttttaattttaaacttttcttg

SEQ ID NO: 120833 - DNA, 26 bp, Homo sapiens
actttttaattttaaacttttcttga

SEQ ID NO: 120834 - DNA, 26 bp, Homo sapiens
ctttttaattttaaacttttcttgaa

SEQ ID NO: 120835 - DNA, 26 bp, Homo sapiens
tttttaattttaaacttttcttgaat

SEQ ID NO: 120836 - DNA, 26 bp, Homo sapiens
ttttaattttaaacttttcttgaatg

SEQ ID NO: 120837 - DNA, 26 bp, Homo sapiens
tttaattttaaacttttcttgaatga

SEQ ID NO: 120838 - DNA, 26 bp, Homo sapiens
ttaattttaaacttttcttgaatgaa

SEQ ID NO: 120839 - DNA, 26 bp, Homo sapiens
taattttaaacttttcttgaatgaaa

SEQ ID NO: 120840 - DNA, 26 bp, Homo sapiens
aattttaaacttttcttgaatgaaac

SEQ ID NO: 120841 - DNA, 26 bp, Homo sapiens
attttaaacttttcttgaatgaaact

SEQ ID NO: 120842 - DNA, 26 bp, Homo sapiens
ttttaaacttttcttgaatgaaactg

SEQ ID NO: 120843 - DNA, 26 bp, Homo sapiens
tttaaacttttcttgaatgaaactgc

SEQ ID NO: 120844 - DNA, 26 bp, Homo sapiens
ttaaacttttcttgaatgaaactgct

SEQ ID NO: 120845 - DNA, 26 bp, Homo sapiens
taaacttttcttgaatgaaactgcta

SEQ ID NO: 120846 - DNA, 26 bp, Homo sapiens
aaacttttcttgaatgaaactgctat

SEQ ID NO: 120847 - DNA, 26 bp, Homo sapiens
aacttttcttgaatgaaactgctata

SEQ ID NO: 120848 - DNA, 26 bp, Homo sapiens
acttttcttgaatgaaactgctataa

SEQ ID NO: 120849 - DNA, 26 bp, Homo sapiens
cttttcttgaatgaaactgctataac

SEQ ID NO: 120850 - DNA, 26 bp, Homo sapiens
ttttcttgaatgaaactgctataaca

SEQ ID NO: 120851 - DNA, 26 bp, Homo sapiens
tttcttgaatgaaactgctataacac

SEQ ID NO: 120852 - DNA, 26 bp, Homo sapiens
ttcttgaatgaaactgctataacaca

SEQ ID NO: 120853 - DNA, 26 bp, Homo sapiens
tcttgaatgaaactgctataacacat

SEQ ID NO: 120854 - DNA, 26 bp, Homo sapiens
cttgaatgaaactgctataacacata

SEQ ID NO: 120855 - DNA, 26 bp, Homo sapiens
ttgaatgaaactgctataacacatat

SEQ ID NO: 120856 - DNA, 26 bp, Homo sapiens
tgaatgaaactgctataacacatata

SEQ ID NO: 120857 - DNA, 26 bp, Homo sapiens
gaatgaaactgctataacacatatac

SEQ ID NO: 120858 - DNA, 26 bp, Homo sapiens
aatgaaactgctataacacatatact

SEQ ID NO: 120859 - DNA, 26 bp, Homo sapiens
atgaaactgctataacacatatactt

SEQ ID NO: 120860 - DNA, 26 bp, Homo sapiens
tgaaactgctataacacatatactta

SEQ ID NO: 120861 - DNA, 26 bp, Homo sapiens
gaaactgctataacacatatacttac

SEQ ID NO: 120862 - DNA, 26 bp, Homo sapiens
aaactgctataacacatatacttaca

SEQ ID NO: 120863 - DNA, 26 bp, Homo sapiens
aactgctataacacatatacttacaa

SEQ ID NO: 120864 - DNA, 26 bp, Homo sapiens
actgctataacacatatacttacaaa

SEQ ID NO: 120865 - DNA, 26 bp, Homo sapiens
ctgctataacacatatacttacaaaa

SEQ ID NO: 120866 - DNA, 26 bp, Homo sapiens
tgctataacacatatacttacaaaat

SEQ ID NO: 120867 - DNA, 26 bp, Homo sapiens
gctataacacatatacttacaaaatg

SEQ ID NO: 120868 - DNA, 26 bp, Homo sapiens
ctataacacatatacttacaaaatga

SEQ ID NO: 120869 - DNA, 26 bp, Homo sapiens
tataacacatatacttacaaaatgag

SEQ ID NO: 120870 - DNA, 26 bp, Homo sapiens
ataacacatatacttacaaaatgagc

SEQ ID NO: 120871 - DNA, 26 bp, Homo sapiens
taacacatatacttacaaaatgagca

SEQ ID NO: 120872 - DNA, 26 bp, Homo sapiens
aacacatatacttacaaaatgagcaa

SEQ ID NO: 120873 - DNA, 26 bp, Homo sapiens
acacatatacttacaaaatgagcaac

SEQ ID NO: 120874 - DNA, 26 bp, Homo sapiens
cacatatacttacaaaatgagcaaca

SEQ ID NO: 120875 - DNA, 26 bp, Homo sapiens
acatatacttacaaaatgagcaacag

SEQ ID NO: 120876 - DNA, 26 bp, Homo sapiens
catatacttacaaaatgagcaacagt

SEQ ID NO: 120877 - DNA, 26 bp, Homo sapiens
atatacttacaaaatgagcaacagtg

SEQ ID NO: 120878 - DNA, 26 bp, Homo sapiens
tatacttacaaaatgagcaacagtgt

SEQ ID NO: 120879 - DNA, 26 bp, Homo sapiens
atacttacaaaatgagcaacagtgtt

SEQ ID NO: 120880 - DNA, 26 bp, Homo sapiens
tacttacaaaatgagcaacagtgtta

SEQ ID NO: 120881 - DNA, 26 bp, Homo sapiens
acttacaaaatgagcaacagtgttat

SEQ ID NO: 120882 - DNA, 26 bp, Homo sapiens
cttacaaaatgagcaacagtgttatg

SEQ ID NO: 120883 - DNA, 26 bp, Homo sapiens
ttacaaaatgagcaacagtgttatgt

SEQ ID NO: 120884 - DNA, 26 bp, Homo sapiens
tacaaaatgagcaacagtgttatgtt

SEQ ID NO: 120885 - DNA, 26 bp, Homo sapiens
acaaaatgagcaacagtgttatgtta

SEQ ID NO: 120886 - DNA, 26 bp, Homo sapiens
caaaatgagcaacagtgttatgttat

SEQ ID NO: 120887 - DNA, 26 bp, Homo sapiens
aaaatgagcaacagtgttatgttatt

SEQ ID NO: 120888 - DNA, 26 bp, Homo sapiens
aaatgagcaacagtgttatgttatta

SEQ ID NO: 120889 - DNA, 26 bp, Homo sapiens
aatgagcaacagtgttatgttattaa

SEQ ID NO: 120890 - DNA, 26 bp, Homo sapiens
atgagcaacagtgttatgttattaaa

SEQ ID NO: 120891 - DNA, 26 bp, Homo sapiens
tgagcaacagtgttatgttattaaaa

SEQ ID NO: 120892 - DNA, 26 bp, Homo sapiens
gagcaacagtgttatgttattaaaat

SEQ ID NO: 120893 - DNA, 26 bp, Homo sapiens
agcaacagtgttatgttattaaaata

SEQ ID NO: 120894 - DNA, 26 bp, Homo sapiens
gcaacagtgttatgttattaaaataa

SEQ ID NO: 120895 - DNA, 26 bp, Homo sapiens
caacagtgttatgttattaaaataaa

SEQ ID NO: 120896 - DNA, 26 bp, Homo sapiens
aacagtgttatgttattaaaataaaa

SEQ ID NO: 120897 - DNA, 26 bp, Homo sapiens
acagtgttatgttattaaaataaaat

SEQ ID NO: 120898 - DNA, 26 bp, Homo sapiens
cagtgttatgttattaaaataaaata

SEQ ID NO: 120899 - DNA, 26 bp, Homo sapiens
agtgttatgttattaaaataaaataa

SEQ ID NO: 120900 - DNA, 26 bp, Homo sapiens
gtgttatgttattaaaataaaataaa

SEQ ID NO: 120901 - DNA, 26 bp, Homo sapiens
tgttatgttattaaaataaaataaac

SEQ ID NO: 120902 - DNA, 26 bp, Homo sapiens
gttatgttattaaaataaaataaacc

SEQ ID NO: 120903 - DNA, 26 bp, Homo sapiens
ttatgttattaaaataaaataaacct

SEQ ID NO: 120904 - DNA, 26 bp, Homo sapiens
tatgttattaaaataaaataaacctc

SEQ ID NO: 120905 - DNA, 26 bp, Homo sapiens
atgttattaaaataaaataaacctca

SEQ ID NO: 120906 - DNA, 26 bp, Homo sapiens
tgttattaaaataaaataaacctcat

SEQ ID NO: 120907 - DNA, 26 bp, Homo sapiens
gttattaaaataaaataaacctcatt

SEQ ID NO: 120908 - DNA, 26 bp, Homo sapiens
ttattaaaataaaataaacctcattt

SEQ ID NO: 120909 - DNA, 26 bp, Homo sapiens
tattaaaataaaataaacctcatttt

SEQ ID NO: 120910 - DNA, 26 bp, Homo sapiens
attaaaataaaataaacctcatttta

SEQ ID NO: 120911 - DNA, 26 bp, Homo sapiens
ttaaaataaaataaacctcattttat

SEQ ID NO: 120912 - DNA, 26 bp, Homo sapiens
taaaataaaataaacctcattttata

SEQ ID NO: 120913 - DNA, 26 bp, Homo sapiens
aaaataaaataaacctcattttatat

SEQ ID NO: 120914 - DNA, 26 bp, Homo sapiens
aaataaaataaacctcattttatatt

SEQ ID NO: 120915 - DNA, 26 bp, Homo sapiens
aataaaataaacctcattttatattt

SEQ ID NO: 120916 - DNA, 26 bp, Homo sapiens
ataaaataaacctcattttatatttt

SEQ ID NO: 120917 - DNA, 26 bp, Homo sapiens
taaaataaacctcattttatattttc

SEQ ID NO: 120918 - DNA, 26 bp, Homo sapiens
aaaataaacctcattttatattttct

SEQ ID NO: 120919 - DNA, 26 bp, Homo sapiens
aaataaacctcattttatattttctt

SEQ ID NO: 120920 - DNA, 26 bp, Homo sapiens
aataaacctcattttatattttctta

SEQ ID NO: 120921 - DNA, 26 bp, Homo sapiens
ataaacctcattttatattttcttac

SEQ ID NO: 120922 - DNA, 26 bp, Homo sapiens
taaacctcattttatattttcttacc

SEQ ID NO: 120923 - DNA, 26 bp, Homo sapiens
aaacctcattttatattttcttacct

SEQ ID NO: 120924 - DNA, 26 bp, Homo sapiens
aacctcattttatattttcttacctg

SEQ ID NO: 120925 - DNA, 26 bp, Homo sapiens
acctcattttatattttcttacctgg

SEQ ID NO: 120926 - DNA, 26 bp, Homo sapiens
cctcattttatattttcttacctgga

SEQ ID NO: 120927 - DNA, 26 bp, Homo sapiens
ctcattttatattttcttacctggaa

SEQ ID NO: 120928 - DNA, 26 bp, Homo sapiens
tcattttatattttcttacctggaat

SEQ ID NO: 120929 - DNA, 26 bp, Homo sapiens
cattttatattttcttacctggaata

SEQ ID NO: 120930 - DNA, 26 bp, Homo sapiens
attttatattttcttacctggaatat

SEQ ID NO: 120931 - DNA, 26 bp, Homo sapiens
ttttatattttcttacctggaatatt

SEQ ID NO: 120932 - DNA, 26 bp, Homo sapiens
tttatattttcttacctggaatattc

SEQ ID NO: 120933 - DNA, 26 bp, Homo sapiens
ttatattttcttacctggaatattca

SEQ ID NO: 120934 - DNA, 26 bp, Homo sapiens
tatattttcttacctggaatattcag

SEQ ID NO: 120935 - DNA, 26 bp, Homo sapiens
atattttcttacctggaatattcagg

SEQ ID NO: 120936 - DNA, 26 bp, Homo sapiens
tattttcttacctggaatattcaggc

SEQ ID NO: 120937 - DNA, 26 bp, Homo sapiens
attttcttacctggaatattcaggct

SEQ ID NO: 120938 - DNA, 26 bp, Homo sapiens
ttttcttacctggaatattcaggctc

SEQ ID NO: 120939 - DNA, 26 bp, Homo sapiens
tttcttacctggaatattcaggctct

SEQ ID NO: 120940 - DNA, 26 bp, Homo sapiens
ttcttacctggaatattcaggctctt

SEQ ID NO: 120941 - DNA, 26 bp, Homo sapiens
tcttacctggaatattcaggctctta

SEQ ID NO: 120942 - DNA, 26 bp, Homo sapiens
cttacctggaatattcaggctcttaa

SEQ ID NO: 120943 - DNA, 26 bp, Homo sapiens
ttacctggaatattcaggctcttaaa

SEQ ID NO: 120944 - DNA, 26 bp, Homo sapiens
tacctggaatattcaggctcttaaat

SEQ ID NO: 120945 - DNA, 26 bp, Homo sapiens
acctggaatattcaggctcttaaata

SEQ ID NO: 120946 - DNA, 26 bp, Homo sapiens
cctggaatattcaggctcttaaatac

SEQ ID NO: 120947 - DNA, 26 bp, Homo sapiens
ctggaatattcaggctcttaaatacg

SEQ ID NO: 120948 - DNA, 26 bp, Homo sapiens
tggaatattcaggctcttaaatacgt

SEQ ID NO: 120949 - DNA, 26 bp, Homo sapiens
ggaatattcaggctcttaaatacgtg

SEQ ID NO: 120950 - DNA, 26 bp, Homo sapiens
gaatattcaggctcttaaatacgtga

SEQ ID NO: 120951 - DNA, 26 bp, Homo sapiens
aatattcaggctcttaaatacgtgag

SEQ ID NO: 120952 - DNA, 26 bp, Homo sapiens
atattcaggctcttaaatacgtgagc

SEQ ID NO: 120953 - DNA, 26 bp, Homo sapiens
tattcaggctcttaaatacgtgagcc

SEQ ID NO: 120954 - DNA, 26 bp, Homo sapiens
attcaggctcttaaatacgtgagcca

SEQ ID NO: 120955 - DNA, 26 bp, Homo sapiens
ttcaggctcttaaatacgtgagccaa

SEQ ID NO: 120956 - DNA, 26 bp, Homo sapiens
tcaggctcttaaatacgtgagccaag

SEQ ID NO: 120957 - DNA, 26 bp, Homo sapiens
caggctcttaaatacgtgagccaaga

SEQ ID NO: 120958 - DNA, 26 bp, Homo sapiens
aggctcttaaatacgtgagccaagat

SEQ ID NO: 120959 - DNA, 26 bp, Homo sapiens
ggctcttaaatacgtgagccaagata

SEQ ID NO: 120960 - DNA, 26 bp, Homo sapiens
gctcttaaatacgtgagccaagatat

SEQ ID NO: 120961 - DNA, 26 bp, Homo sapiens
ctcttaaatacgtgagccaagatatt

SEQ ID NO: 120962 - DNA, 26 bp, Homo sapiens
tcttaaatacgtgagccaagatattt

SEQ ID NO: 120963 - DNA, 26 bp, Homo sapiens
cttaaatacgtgagccaagatatttt

SEQ ID NO: 120964 - DNA, 26 bp, Homo sapiens
ttaaatacgtgagccaagatattttg

SEQ ID NO: 120965 - DNA, 26 bp, Homo sapiens
taaatacgtgagccaagatattttgt

SEQ ID NO: 120966 - DNA, 26 bp, Homo sapiens
aaatacgtgagccaagatattttgtc

SEQ ID NO: 120967 - DNA, 26 bp, Homo sapiens
aatacgtgagccaagatattttgtcc

SEQ ID NO: 120968 - DNA, 26 bp, Homo sapiens
atacgtgagccaagatattttgtccc

SEQ ID NO: 120969 - DNA, 26 bp, Homo sapiens
tacgtgagccaagatattttgtccct

SEQ ID NO: 120970 - DNA, 26 bp, Homo sapiens
acgtgagccaagatattttgtcccta

SEQ ID NO: 120971 - DNA, 26 bp, Homo sapiens
cgtgagccaagatattttgtccctac

SEQ ID NO: 120972 - DNA, 26 bp, Homo sapiens
gtgagccaagatattttgtccctact

SEQ ID NO: 120973 - DNA, 26 bp, Homo sapiens
tgagccaagatattttgtccctactc

SEQ ID NO: 120974 - DNA, 26 bp, Homo sapiens
gagccaagatattttgtccctactcc

SEQ ID NO: 120975 - DNA, 26 bp, Homo sapiens
agccaagatattttgtccctactcca

SEQ ID NO: 120976 - DNA, 26 bp, Homo sapiens
gccaagatattttgtccctactccaa

SEQ ID NO: 120977 - DNA, 26 bp, Homo sapiens
ccaagatattttgtccctactccaag

SEQ ID NO: 120978 - DNA, 26 bp, Homo sapiens
caagatattttgtccctactccaagt

SEQ ID NO: 120979 - DNA, 26 bp, Homo sapiens
aagatattttgtccctactccaagta

SEQ ID NO: 120980 - DNA, 26 bp, Homo sapiens
agatattttgtccctactccaagtag

SEQ ID NO: 120981 - DNA, 26 bp, Homo sapiens
gatattttgtccctactccaagtagc

SEQ ID NO: 120982 - DNA, 26 bp, Homo sapiens
atattttgtccctactccaagtagct

SEQ ID NO: 120983 - DNA, 26 bp, Homo sapiens
tattttgtccctactccaagtagctt

SEQ ID NO: 120984 - DNA, 26 bp, Homo sapiens
attttgtccctactccaagtagcttg

SEQ ID NO: 120985 - DNA, 26 bp, Homo sapiens
ttttgtccctactccaagtagcttgg

SEQ ID NO: 120986 - DNA, 26 bp, Homo sapiens
tttgtccctactccaagtagcttgga

SEQ ID NO: 120987 - DNA, 26 bp, Homo sapiens
ttgtccctactccaagtagcttggaa

SEQ ID NO: 120988 - DNA, 26 bp, Homo sapiens
tgtccctactccaagtagcttggaag

SEQ ID NO: 120989 - DNA, 26 bp, Homo sapiens
gtccctactccaagtagcttggaagc

SEQ ID NO: 120990 - DNA, 26 bp, Homo sapiens
tccctactccaagtagcttggaagcc

SEQ ID NO: 120991 - DNA, 26 bp, Homo sapiens
ccctactccaagtagcttggaagccc

SEQ ID NO: 120992 - DNA, 26 bp, Homo sapiens
cctactccaagtagcttggaagcccc

SEQ ID NO: 120993 - DNA, 26 bp, Homo sapiens
ctactccaagtagcttggaagcccca

SEQ ID NO: 120994 - DNA, 26 bp, Homo sapiens
tactccaagtagcttggaagccccag

SEQ ID NO: 120995 - DNA, 26 bp, Homo sapiens
actccaagtagcttggaagccccagg

SEQ ID NO: 120996 - DNA, 26 bp, Homo sapiens
ctccaagtagcttggaagccccaggt

SEQ ID NO: 120997 - DNA, 26 bp, Homo sapiens
tccaagtagcttggaagccccaggta

SEQ ID NO: 120998 - DNA, 26 bp, Homo sapiens
ccaagtagcttggaagccccaggtag

SEQ ID NO: 120999 - DNA, 26 bp, Homo sapiens
caagtagcttggaagccccaggtaga

SEQ ID NO: 121000 - DNA, 26 bp, Homo sapiens
aagtagcttggaagccccaggtagag

SEQ ID NO: 121001 - DNA, 26 bp, Homo sapiens
agtagcttggaagccccaggtagagt

SEQ ID NO: 121002 - DNA, 26 bp, Homo sapiens
gtagcttggaagccccaggtagagtg

SEQ ID NO: 121003 - DNA, 26 bp, Homo sapiens
tagcttggaagccccaggtagagtga

SEQ ID NO: 121004 - DNA, 26 bp, Homo sapiens
agcttggaagccccaggtagagtgac

SEQ ID NO: 121005 - DNA, 26 bp, Homo sapiens
gcttggaagccccaggtagagtgaca

SEQ ID NO: 121006 - DNA, 26 bp, Homo sapiens
cttggaagccccaggtagagtgacaa

SEQ ID NO: 121007 - DNA, 26 bp, Homo sapiens
ttggaagccccaggtagagtgacaat

SEQ ID NO: 121008 - DNA, 26 bp, Homo sapiens
tggaagccccaggtagagtgacaatc

SEQ ID NO: 121009 - DNA, 26 bp, Homo sapiens
ggaagccccaggtagagtgacaatca

SEQ ID NO: 121010 - DNA, 26 bp, Homo sapiens
gaagccccaggtagagtgacaatcat

SEQ ID NO: 121011 - DNA, 26 bp, Homo sapiens
aagccccaggtagagtgacaatcatt

SEQ ID NO: 121012 - DNA, 26 bp, Homo sapiens
agccccaggtagagtgacaatcatta

SEQ ID NO: 121013 - DNA, 26 bp, Homo sapiens
gccccaggtagagtgacaatcattat

SEQ ID NO: 121014 - DNA, 26 bp, Homo sapiens
ccccaggtagagtgacaatcattatg

SEQ ID NO: 121015 - DNA, 26 bp, Homo sapiens
cccaggtagagtgacaatcattatgt

SEQ ID NO: 121016 - DNA, 26 bp, Homo sapiens
ccaggtagagtgacaatcattatgtt

SEQ ID NO: 121017 - DNA, 26 bp, Homo sapiens
caggtagagtgacaatcattatgttg

SEQ ID NO: 121018 - DNA, 26 bp, Homo sapiens
aggtagagtgacaatcattatgttgc

SEQ ID NO: 121019 - DNA, 26 bp, Homo sapiens
ggtagagtgacaatcattatgttgct

SEQ ID NO: 121020 - DNA, 26 bp, Homo sapiens
gtagagtgacaatcattatgttgcta

SEQ ID NO: 121021 - DNA, 26 bp, Homo sapiens
tagagtgacaatcattatgttgctag

SEQ ID NO: 121022 - DNA, 26 bp, Homo sapiens
agagtgacaatcattatgttgctagc

SEQ ID NO: 121023 - DNA, 26 bp, Homo sapiens
gagtgacaatcattatgttgctagcc

SEQ ID NO: 121024 - DNA, 26 bp, Homo sapiens
agtgacaatcattatgttgctagcca

SEQ ID NO: 121025 - DNA, 26 bp, Homo sapiens
gtgacaatcattatgttgctagccat

SEQ ID NO: 121026 - DNA, 26 bp, Homo sapiens
tgacaatcattatgttgctagccatg

SEQ ID NO: 121027 - DNA, 26 bp, Homo sapiens
gacaatcattatgttgctagccatgt

SEQ ID NO: 121028 - DNA, 26 bp, Homo sapiens
acaatcattatgttgctagccatgtc

SEQ ID NO: 121029 - DNA, 26 bp, Homo sapiens
caatcattatgttgctagccatgtca

SEQ ID NO: 121030 - DNA, 26 bp, Homo sapiens
aatcattatgttgctagccatgtcaa

SEQ ID NO: 121031 - DNA, 26 bp, Homo sapiens
atcattatgttgctagccatgtcaag

SEQ ID NO: 121032 - DNA, 26 bp, Homo sapiens
tcattatgttgctagccatgtcaagg

SEQ ID NO: 121033 - DNA, 26 bp, Homo sapiens
cattatgttgctagccatgtcaagga

SEQ ID NO: 121034 - DNA, 26 bp, Homo sapiens
attatgttgctagccatgtcaaggat

SEQ ID NO: 121035 - DNA, 26 bp, Homo sapiens
ttatgttgctagccatgtcaaggatc

SEQ ID NO: 121036 - DNA, 26 bp, Homo sapiens
tatgttgctagccatgtcaaggatct

SEQ ID NO: 121037 - DNA, 26 bp, Homo sapiens
atgttgctagccatgtcaaggatctt

SEQ ID NO: 121038 - DNA, 26 bp, Homo sapiens
tgttgctagccatgtcaaggatcttt

SEQ ID NO: 121039 - DNA, 26 bp, Homo sapiens
gttgctagccatgtcaaggatcttta

SEQ ID NO: 121040 - DNA, 26 bp, Homo sapiens
ttgctagccatgtcaaggatctttaa

SEQ ID NO: 121041 - DNA, 26 bp, Homo sapiens
tgctagccatgtcaaggatctttaag

SEQ ID NO: 121042 - DNA, 26 bp, Homo sapiens
gctagccatgtcaaggatctttaaga

SEQ ID NO: 121043 - DNA, 26 bp, Homo sapiens
ctagccatgtcaaggatctttaagag

SEQ ID NO: 121044 - DNA, 26 bp, Homo sapiens
tagccatgtcaaggatctttaagagc

SEQ ID NO: 121045 - DNA, 26 bp, Homo sapiens
agccatgtcaaggatctttaagagcc

SEQ ID NO: 121046 - DNA, 26 bp, Homo sapiens
gccatgtcaaggatctttaagagcct

SEQ ID NO: 121047 - DNA, 26 bp, Homo sapiens
ccatgtcaaggatctttaagagcctt

SEQ ID NO: 121048 - DNA, 26 bp, Homo sapiens
catgtcaaggatctttaagagcctta

SEQ ID NO: 121049 - DNA, 26 bp, Homo sapiens
atgtcaaggatctttaagagccttaa

SEQ ID NO: 121050 - DNA, 26 bp, Homo sapiens
tgtcaaggatctttaagagccttaac

SEQ ID NO: 121051 - DNA, 26 bp, Homo sapiens
gtcaaggatctttaagagccttaact

SEQ ID NO: 121052 - DNA, 26 bp, Homo sapiens
tcaaggatctttaagagccttaactg

SEQ ID NO: 121053 - DNA, 26 bp, Homo sapiens
caaggatctttaagagccttaactgt

SEQ ID NO: 121054 - DNA, 26 bp, Homo sapiens
aaggatctttaagagccttaactgtt

SEQ ID NO: 121055 - DNA, 26 bp, Homo sapiens
aggatctttaagagccttaactgttc

SEQ ID NO: 121056 - DNA, 26 bp, Homo sapiens
ggatctttaagagccttaactgttca

SEQ ID NO: 121057 - DNA, 26 bp, Homo sapiens
gatctttaagagccttaactgttcat

SEQ ID NO: 121058 - DNA, 26 bp, Homo sapiens
atctttaagagccttaactgttcatt

SEQ ID NO: 121059 - DNA, 26 bp, Homo sapiens
tctttaagagccttaactgttcattt

SEQ ID NO: 121060 - DNA, 26 bp, Homo sapiens
ctttaagagccttaactgttcatttt

SEQ ID NO: 121061 - DNA, 26 bp, Homo sapiens
tttaagagccttaactgttcattttt

SEQ ID NO: 121062 - DNA, 26 bp, Homo sapiens
ttaagagccttaactgttcattttta

SEQ ID NO: 121063 - DNA, 26 bp, Homo sapiens
taagagccttaactgttcatttttag

SEQ ID NO: 121064 - DNA, 26 bp, Homo sapiens
aagagccttaactgttcatttttagt

SEQ ID NO: 121065 - DNA, 26 bp, Homo sapiens
agagccttaactgttcatttttagtg

SEQ ID NO: 121066 - DNA, 26 bp, Homo sapiens
gagccttaactgttcatttttagtgc

SEQ ID NO: 121067 - DNA, 26 bp, Homo sapiens
agccttaactgttcatttttagtgct

SEQ ID NO: 121068 - DNA, 26 bp, Homo sapiens
gccttaactgttcatttttagtgctt

SEQ ID NO: 121069 - DNA, 26 bp, Homo sapiens
ccttaactgttcatttttagtgcttt

SEQ ID NO: 121070 - DNA, 26 bp, Homo sapiens
cttaactgttcatttttagtgctttc

SEQ ID NO: 121071 - DNA, 26 bp, Homo sapiens
ttaactgttcatttttagtgctttca

SEQ ID NO: 121072 - DNA, 26 bp, Homo sapiens
taactgttcatttttagtgctttcaa

SEQ ID NO: 121073 - DNA, 26 bp, Homo sapiens
aactgttcatttttagtgctttcaat

SEQ ID NO: 121074 - DNA, 26 bp, Homo sapiens
actgttcatttttagtgctttcaatt

SEQ ID NO: 121075 - DNA, 26 bp, Homo sapiens
ctgttcatttttagtgctttcaattt

SEQ ID NO: 121076 - DNA, 26 bp, Homo sapiens
tgttcatttttagtgctttcaatttt

SEQ ID NO: 121077 - DNA, 26 bp, Homo sapiens
gttcatttttagtgctttcaattttt

SEQ ID NO: 121078 - DNA, 26 bp, Homo sapiens
ttcatttttagtgctttcaatttttt

SEQ ID NO: 121079 - DNA, 26 bp, Homo sapiens
tcatttttagtgctttcaattttttc

SEQ ID NO: 121080 - DNA, 26 bp, Homo sapiens
catttttagtgctttcaattttttct

SEQ ID NO: 121081 - DNA, 26 bp, Homo sapiens
atttttagtgctttcaattttttctt

SEQ ID NO: 121082 - DNA, 26 bp, Homo sapiens
tttttagtgctttcaattttttcttt

SEQ ID NO: 121083 - DNA, 26 bp, Homo sapiens
ttttagtgctttcaattttttctttc

SEQ ID NO: 121084 - DNA, 26 bp, Homo sapiens
tttagtgctttcaattttttctttca

SEQ ID NO: 121085 - DNA, 26 bp, Homo sapiens
ttagtgctttcaattttttctttcag

SEQ ID NO: 121086 - DNA, 26 bp, Homo sapiens
tagtgctttcaattttttctttcagt

SEQ ID NO: 121087 - DNA, 26 bp, Homo sapiens
agtgctttcaattttttctttcagtt

SEQ ID NO: 121088 - DNA, 26 bp, Homo sapiens
gtgctttcaattttttctttcagttg

SEQ ID NO: 121089 - DNA, 26 bp, Homo sapiens
tgctttcaattttttctttcagttga

SEQ ID NO: 121090 - DNA, 26 bp, Homo sapiens
gctttcaattttttctttcagttgat

SEQ ID NO: 121091 - DNA, 26 bp, Homo sapiens
ctttcaattttttctttcagttgatt

SEQ ID NO: 121092 - DNA, 26 bp, Homo sapiens
tttcaattttttctttcagttgatta

SEQ ID NO: 121093 - DNA, 26 bp, Homo sapiens
ttcaattttttctttcagttgattaa

SEQ ID NO: 121094 - DNA, 26 bp, Homo sapiens
tcaattttttctttcagttgattaat

SEQ ID NO: 121095 - DNA, 26 bp, Homo sapiens
caattttttctttcagttgattaatc

SEQ ID NO: 121096 - DNA, 26 bp, Homo sapiens
aattttttctttcagttgattaatct

SEQ ID NO: 121097 - DNA, 26 bp, Homo sapiens
attttttctttcagttgattaatctc

SEQ ID NO: 121098 - DNA, 26 bp, Homo sapiens
ttttttctttcagttgattaatctct

SEQ ID NO: 121099 - DNA, 26 bp, Homo sapiens
tttttctttcagttgattaatctctt

SEQ ID NO: 121100 - DNA, 26 bp, Homo sapiens
ttttctttcagttgattaatctcttt

SEQ ID NO: 121101 - DNA, 26 bp, Homo sapiens
tttctttcagttgattaatctcttta

SEQ ID NO: 121102 - DNA, 26 bp, Homo sapiens
ttctttcagttgattaatctctttat

SEQ ID NO: 121103 - DNA, 26 bp, Homo sapiens
tctttcagttgattaatctctttatt

SEQ ID NO: 121104 - DNA, 26 bp, Homo sapiens
ctttcagttgattaatctctttattt

SEQ ID NO: 121105 - DNA, 26 bp, Homo sapiens
tttcagttgattaatctctttattta

SEQ ID NO: 121106 - DNA, 26 bp, Homo sapiens
ttcagttgattaatctctttatttaa

SEQ ID NO: 121107 - DNA, 26 bp, Homo sapiens
tcagttgattaatctctttatttaac

SEQ ID NO: 121108 - DNA, 26 bp, Homo sapiens
cagttgattaatctctttatttaact

SEQ ID NO: 121109 - DNA, 26 bp, Homo sapiens
agttgattaatctctttatttaactg

SEQ ID NO: 121110 - DNA, 26 bp, Homo sapiens
gttgattaatctctttatttaactgc

SEQ ID NO: 121111 - DNA, 26 bp, Homo sapiens
ttgattaatctctttatttaactgct

SEQ ID NO: 121112 - DNA, 26 bp, Homo sapiens
tgattaatctctttatttaactgctc

SEQ ID NO: 121113 - DNA, 26 bp, Homo sapiens
gattaatctctttatttaactgctca

SEQ ID NO: 121114 - DNA, 26 bp, Homo sapiens
attaatctctttatttaactgctcag

SEQ ID NO: 121115 - DNA, 26 bp, Homo sapiens
ttaatctctttatttaactgctcaga

SEQ ID NO: 121116 - DNA, 26 bp, Homo sapiens
taatctctttatttaactgctcagat

SEQ ID NO: 121117 - DNA, 26 bp, Homo sapiens
aatctctttatttaactgctcagatt

SEQ ID NO: 121118 - DNA, 26 bp, Homo sapiens
atctctttatttaactgctcagattt

SEQ ID NO: 121119 - DNA, 26 bp, Homo sapiens
tctctttatttaactgctcagatttc

SEQ ID NO: 121120 - DNA, 26 bp, Homo sapiens
ctctttatttaactgctcagatttct

SEQ ID NO: 121121 - DNA, 26 bp, Homo sapiens
tctttatttaactgctcagatttctt

SEQ ID NO: 121122 - DNA, 26 bp, Homo sapiens
ctttatttaactgctcagatttcttt

SEQ ID NO: 121123 - DNA, 26 bp, Homo sapiens
tttatttaactgctcagatttctttt

SEQ ID NO: 121124 - DNA, 26 bp, Homo sapiens
ttatttaactgctcagatttcttttg

SEQ ID NO: 121125 - DNA, 26 bp, Homo sapiens
tatttaactgctcagatttcttttga

SEQ ID NO: 121126 - DNA, 26 bp, Homo sapiens
atttaactgctcagatttcttttgaa

SEQ ID NO: 121127 - DNA, 26 bp, Homo sapiens
tttaactgctcagatttcttttgaaa

SEQ ID NO: 121128 - DNA, 26 bp, Homo sapiens
ttaactgctcagatttcttttgaaat

SEQ ID NO: 121129 - DNA, 26 bp, Homo sapiens
taactgctcagatttcttttgaaatt

SEQ ID NO: 121130 - DNA, 26 bp, Homo sapiens
aactgctcagatttcttttgaaattc

SEQ ID NO: 121131 - DNA, 26 bp, Homo sapiens
actgctcagatttcttttgaaattct

SEQ ID NO: 121132 - DNA, 26 bp, Homo sapiens
ctgctcagatttcttttgaaattctt

SEQ ID NO: 121133 - DNA, 26 bp, Homo sapiens
tgctcagatttcttttgaaattcttc

SEQ ID NO: 121134 - DNA, 26 bp, Homo sapiens
gctcagatttcttttgaaattcttcc

SEQ ID NO: 121135 - DNA, 26 bp, Homo sapiens
ctcagatttcttttgaaattcttcct

SEQ ID NO: 121136 - DNA, 26 bp, Homo sapiens
tcagatttcttttgaaattcttcctt

SEQ ID NO: 121137 - DNA, 26 bp, Homo sapiens
cagatttcttttgaaattcttcctta

SEQ ID NO: 121138 - DNA, 26 bp, Homo sapiens
agatttcttttgaaattcttccttaa

SEQ ID NO: 121139 - DNA, 26 bp, Homo sapiens
gatttcttttgaaattcttccttaag

SEQ ID NO: 121140 - DNA, 26 bp, Homo sapiens
atttcttttgaaattcttccttaagc

SEQ ID NO: 121141 - DNA, 26 bp, Homo sapiens
tttcttttgaaattcttccttaagca

SEQ ID NO: 121142 - DNA, 26 bp, Homo sapiens
ttcttttgaaattcttccttaagcat

SEQ ID NO: 121143 - DNA, 26 bp, Homo sapiens
tcttttgaaattcttccttaagcatt

SEQ ID NO: 121144 - DNA, 26 bp, Homo sapiens
cttttgaaattcttccttaagcattt

SEQ ID NO: 121145 - DNA, 26 bp, Homo sapiens
ttttgaaattcttccttaagcatttc

SEQ ID NO: 121146 - DNA, 26 bp, Homo sapiens
tttgaaattcttccttaagcatttct

SEQ ID NO: 121147 - DNA, 26 bp, Homo sapiens
ttgaaattcttccttaagcatttctt

SEQ ID NO: 121148 - DNA, 26 bp, Homo sapiens
tgaaattcttccttaagcatttcttc

SEQ ID NO: 121149 - DNA, 26 bp, Homo sapiens
gaaattcttccttaagcatttcttct

SEQ ID NO: 121150 - DNA, 26 bp, Homo sapiens
aaattcttccttaagcatttcttctt

SEQ ID NO: 121151 - DNA, 26 bp, Homo sapiens
aattcttccttaagcatttcttcttg

SEQ ID NO: 121152 - DNA, 26 bp, Homo sapiens
attcttccttaagcatttcttcttgt

SEQ ID NO: 121153 - DNA, 26 bp, Homo sapiens
ttcttccttaagcatttcttcttgta

SEQ ID NO: 121154 - DNA, 26 bp, Homo sapiens
tcttccttaagcatttcttcttgtac

SEQ ID NO: 121155 - DNA, 26 bp, Homo sapiens
cttccttaagcatttcttcttgtacc

SEQ ID NO: 121156 - DNA, 26 bp, Homo sapiens
ttccttaagcatttcttcttgtacct

SEQ ID NO: 121157 - DNA, 26 bp, Homo sapiens
tccttaagcatttcttcttgtacctt

SEQ ID NO: 121158 - DNA, 26 bp, Homo sapiens
ccttaagcatttcttcttgtaccttc

SEQ ID NO: 121159 - DNA, 26 bp, Homo sapiens
cttaagcatttcttcttgtaccttca

SEQ ID NO: 121160 - DNA, 26 bp, Homo sapiens
ttaagcatttcttcttgtaccttcag

SEQ ID NO: 121161 - DNA, 26 bp, Homo sapiens
taagcatttcttcttgtaccttcagc

SEQ ID NO: 121162 - DNA, 26 bp, Homo sapiens
aagcatttcttcttgtaccttcagct

SEQ ID NO: 121163 - DNA, 26 bp, Homo sapiens
agcatttcttcttgtaccttcagctt

SEQ ID NO: 121164 - DNA, 26 bp, Homo sapiens
gcatttcttcttgtaccttcagcttg

SEQ ID NO: 121165 - DNA, 26 bp, Homo sapiens
catttcttcttgtaccttcagcttgt

SEQ ID NO: 121166 - DNA, 26 bp, Homo sapiens
atttcttcttgtaccttcagcttgtg

SEQ ID NO: 121167 - DNA, 26 bp, Homo sapiens
tttcttcttgtaccttcagcttgtgt

SEQ ID NO: 121168 - DNA, 26 bp, Homo sapiens
ttcttcttgtaccttcagcttgtgtt

SEQ ID NO: 121169 - DNA, 26 bp, Homo sapiens
tcttcttgtaccttcagcttgtgttt

SEQ ID NO: 121170 - DNA, 26 bp, Homo sapiens
cttcttgtaccttcagcttgtgtttt

SEQ ID NO: 121171 - DNA, 26 bp, Homo sapiens
ttcttgtaccttcagcttgtgtttta

SEQ ID NO: 121172 - DNA, 26 bp, Homo sapiens
tcttgtaccttcagcttgtgttttag

SEQ ID NO: 121173 - DNA, 26 bp, Homo sapiens
cttgtaccttcagcttgtgttttagc

SEQ ID NO: 121174 - DNA, 26 bp, Homo sapiens
ttgtaccttcagcttgtgttttagca

SEQ ID NO: 121175 - DNA, 26 bp, Homo sapiens
tgtaccttcagcttgtgttttagcag

SEQ ID NO: 121176 - DNA, 26 bp, Homo sapiens
gtaccttcagcttgtgttttagcagc

SEQ ID NO: 121177 - DNA, 26 bp, Homo sapiens
taccttcagcttgtgttttagcagcc

SEQ ID NO: 121178 - DNA, 26 bp, Homo sapiens
accttcagcttgtgttttagcagcct

SEQ ID NO: 121179 - DNA, 26 bp, Homo sapiens
ccttcagcttgtgttttagcagcctt

SEQ ID NO: 121180 - DNA, 26 bp, Homo sapiens
cttcagcttgtgttttagcagccttt

SEQ ID NO: 121181 - DNA, 26 bp, Homo sapiens
ttcagcttgtgttttagcagcctttc

SEQ ID NO: 121182 - DNA, 26 bp, Homo sapiens
tcagcttgtgttttagcagcctttca

SEQ ID NO: 121183 - DNA, 26 bp, Homo sapiens
cagcttgtgttttagcagcctttcat

SEQ ID NO: 121184 - DNA, 26 bp, Homo sapiens
agcttgtgttttagcagcctttcatg

SEQ ID NO: 121185 - DNA, 26 bp, Homo sapiens
gcttgtgttttagcagcctttcatgc

SEQ ID NO: 121186 - DNA, 26 bp, Homo sapiens
cttgtgttttagcagcctttcatgct

SEQ ID NO: 121187 - DNA, 26 bp, Homo sapiens
ttgtgttttagcagcctttcatgctc

SEQ ID NO: 121188 - DNA, 26 bp, Homo sapiens
tgtgttttagcagcctttcatgctct

SEQ ID NO: 121189 - DNA, 26 bp, Homo sapiens
gtgttttagcagcctttcatgctctc

SEQ ID NO: 121190 - DNA, 26 bp, Homo sapiens
tgttttagcagcctttcatgctctct

SEQ ID NO: 121191 - DNA, 26 bp, Homo sapiens
gttttagcagcctttcatgctctctg

SEQ ID NO: 121192 - DNA, 26 bp, Homo sapiens
ttttagcagcctttcatgctctctga

SEQ ID NO: 121193 - DNA, 26 bp, Homo sapiens
tttagcagcctttcatgctctctgag

SEQ ID NO: 121194 - DNA, 26 bp, Homo sapiens
ttagcagcctttcatgctctctgaga

SEQ ID NO: 121195 - DNA, 26 bp, Homo sapiens
tagcagcctttcatgctctctgagaa

SEQ ID NO: 121196 - DNA, 26 bp, Homo sapiens
agcagcctttcatgctctctgagaag

SEQ ID NO: 121197 - DNA, 26 bp, Homo sapiens
gcagcctttcatgctctctgagaagg

SEQ ID NO: 121198 - DNA, 26 bp, Homo sapiens
cagcctttcatgctctctgagaaggt

SEQ ID NO: 121199 - DNA, 26 bp, Homo sapiens
agcctttcatgctctctgagaaggtt

SEQ ID NO: 121200 - DNA, 26 bp, Homo sapiens
gcctttcatgctctctgagaaggttt

SEQ ID NO: 121201 - DNA, 26 bp, Homo sapiens
cctttcatgctctctgagaaggtttt

SEQ ID NO: 121202 - DNA, 26 bp, Homo sapiens
ctttcatgctctctgagaaggttttc

SEQ ID NO: 121203 - DNA, 26 bp, Homo sapiens
tttcatgctctctgagaaggttttcc

SEQ ID NO: 121204 - DNA, 26 bp, Homo sapiens
ttcatgctctctgagaaggttttccc

SEQ ID NO: 121205 - DNA, 26 bp, Homo sapiens
tcatgctctctgagaaggttttccct

SEQ ID NO: 121206 - DNA, 26 bp, Homo sapiens
catgctctctgagaaggttttccctt

SEQ ID NO: 121207 - DNA, 26 bp, Homo sapiens
atgctctctgagaaggttttcccttt

SEQ ID NO: 121208 - DNA, 26 bp, Homo sapiens
tgctctctgagaaggttttccctttc

SEQ ID NO: 121209 - DNA, 26 bp, Homo sapiens
gctctctgagaaggttttccctttcc

SEQ ID NO: 121210 - DNA, 26 bp, Homo sapiens
ctctctgagaaggttttccctttcct

SEQ ID NO: 121211 - DNA, 26 bp, Homo sapiens
tctctgagaaggttttccctttcctc

SEQ ID NO: 121212 - DNA, 26 bp, Homo sapiens
ctctgagaaggttttccctttcctcc

SEQ ID NO: 121213 - DNA, 26 bp, Homo sapiens
tctgagaaggttttccctttcctcct

SEQ ID NO: 121214 - DNA, 26 bp, Homo sapiens
ctgagaaggttttccctttcctcctc

SEQ ID NO: 121215 - DNA, 26 bp, Homo sapiens
tgagaaggttttccctttcctcctcc

SEQ ID NO: 121216 - DNA, 26 bp, Homo sapiens
gagaaggttttccctttcctcctcca

SEQ ID NO: 121217 - DNA, 26 bp, Homo sapiens
agaaggttttccctttcctcctccaa

SEQ ID NO: 121218 - DNA, 26 bp, Homo sapiens
gaaggttttccctttcctcctccaac

SEQ ID NO: 121219 - DNA, 26 bp, Homo sapiens
aaggttttccctttcctcctccaact

SEQ ID NO: 121220 - DNA, 26 bp, Homo sapiens
aggttttccctttcctcctccaactt

SEQ ID NO: 121221 - DNA, 26 bp, Homo sapiens
ggttttccctttcctcctccaacttc

SEQ ID NO: 121222 - DNA, 26 bp, Homo sapiens
gttttccctttcctcctccaacttct

SEQ ID NO: 121223 - DNA, 26 bp, Homo sapiens
ttttccctttcctcctccaacttctt

SEQ ID NO: 121224 - DNA, 26 bp, Homo sapiens
tttccctttcctcctccaacttcttc

SEQ ID NO: 121225 - DNA, 26 bp, Homo sapiens
ttccctttcctcctccaacttcttct

SEQ ID NO: 121226 - DNA, 26 bp, Homo sapiens
tccctttcctcctccaacttcttctc

SEQ ID NO: 121227 - DNA, 26 bp, Homo sapiens
ccctttcctcctccaacttcttctcc

SEQ ID NO: 121228 - DNA, 26 bp, Homo sapiens
cctttcctcctccaacttcttctcca

SEQ ID NO: 121229 - DNA, 26 bp, Homo sapiens
ctttcctcctccaacttcttctccat

SEQ ID NO: 121230 - DNA, 26 bp, Homo sapiens
tttcctcctccaacttcttctccatt

SEQ ID NO: 121231 - DNA, 26 bp, Homo sapiens
ttcctcctccaacttcttctccattt

SEQ ID NO: 121232 - DNA, 26 bp, Homo sapiens
tcctcctccaacttcttctccatttg

SEQ ID NO: 121233 - DNA, 26 bp, Homo sapiens
cctcctccaacttcttctccatttgg

SEQ ID NO: 121234 - DNA, 26 bp, Homo sapiens
ctcctccaacttcttctccatttggg

SEQ ID NO: 121235 - DNA, 26 bp, Homo sapiens
tcctccaacttcttctccatttgggc

SEQ ID NO: 121236 - DNA, 26 bp, Homo sapiens
cctccaacttcttctccatttgggcc

SEQ ID NO: 121237 - DNA, 26 bp, Homo sapiens
ctccaacttcttctccatttgggcca

SEQ ID NO: 121238 - DNA, 26 bp, Homo sapiens
tccaacttcttctccatttgggccat

SEQ ID NO: 121239 - DNA, 26 bp, Homo sapiens
ccaacttcttctccatttgggccatg

SEQ ID NO: 121240 - DNA, 26 bp, Homo sapiens
caacttcttctccatttgggccatgt

SEQ ID NO: 121241 - DNA, 26 bp, Homo sapiens
aacttcttctccatttgggccatgta

SEQ ID NO: 121242 - DNA, 26 bp, Homo sapiens
acttcttctccatttgggccatgtat

SEQ ID NO: 121243 - DNA, 26 bp, Homo sapiens
cttcttctccatttgggccatgtatt

SEQ ID NO: 121244 - DNA, 26 bp, Homo sapiens
ttcttctccatttgggccatgtattc

SEQ ID NO: 121245 - DNA, 26 bp, Homo sapiens
tcttctccatttgggccatgtattcc

SEQ ID NO: 121246 - DNA, 26 bp, Homo sapiens
cttctccatttgggccatgtattcct

SEQ ID NO: 121247 - DNA, 26 bp, Homo sapiens
ttctccatttgggccatgtattcctg

SEQ ID NO: 121248 - DNA, 26 bp, Homo sapiens
tctccatttgggccatgtattcctgg

SEQ ID NO: 121249 - DNA, 26 bp, Homo sapiens
ctccatttgggccatgtattcctgga

SEQ ID NO: 121250 - DNA, 26 bp, Homo sapiens
tccatttgggccatgtattcctggaa

SEQ ID NO: 121251 - DNA, 26 bp, Homo sapiens
ccatttgggccatgtattcctggaag

SEQ ID NO: 121252 - DNA, 26 bp, Homo sapiens
catttgggccatgtattcctggaagc

SEQ ID NO: 121253 - DNA, 26 bp, Homo sapiens
atttgggccatgtattcctggaagct

SEQ ID NO: 121254 - DNA, 26 bp, Homo sapiens
tttgggccatgtattcctggaagctt

SEQ ID NO: 121255 - DNA, 26 bp, Homo sapiens
ttgggccatgtattcctggaagcttc

SEQ ID NO: 121256 - DNA, 26 bp, Homo sapiens
tgggccatgtattcctggaagcttct

SEQ ID NO: 121257 - DNA, 26 bp, Homo sapiens
gggccatgtattcctggaagcttctc

SEQ ID NO: 121258 - DNA, 26 bp, Homo sapiens
ggccatgtattcctggaagcttctct

SEQ ID NO: 121259 - DNA, 26 bp, Homo sapiens
gccatgtattcctggaagcttctctc

SEQ ID NO: 121260 - DNA, 26 bp, Homo sapiens
ccatgtattcctggaagcttctctct

SEQ ID NO: 121261 - DNA, 26 bp, Homo sapiens
catgtattcctggaagcttctctctt

SEQ ID NO: 121262 - DNA, 26 bp, Homo sapiens
atgtattcctggaagcttctctcttg

SEQ ID NO: 121263 - DNA, 26 bp, Homo sapiens
tgtattcctggaagcttctctcttga

SEQ ID NO: 121264 - DNA, 26 bp, Homo sapiens
gtattcctggaagcttctctcttgag

SEQ ID NO: 121265 - DNA, 26 bp, Homo sapiens
tattcctggaagcttctctcttgagc

SEQ ID NO: 121266 - DNA, 26 bp, Homo sapiens
attcctggaagcttctctcttgagcc

SEQ ID NO: 121267 - DNA, 26 bp, Homo sapiens
ttcctggaagcttctctcttgagcct

SEQ ID NO: 121268 - DNA, 26 bp, Homo sapiens
tcctggaagcttctctcttgagcctc

SEQ ID NO: 121269 - DNA, 26 bp, Homo sapiens
cctggaagcttctctcttgagcctcc

SEQ ID NO: 121270 - DNA, 26 bp, Homo sapiens
ctggaagcttctctcttgagcctcca

SEQ ID NO: 121271 - DNA, 26 bp, Homo sapiens
tggaagcttctctcttgagcctccat

SEQ ID NO: 121272 - DNA, 26 bp, Homo sapiens
ggaagcttctctcttgagcctccatc

SEQ ID NO: 121273 - DNA, 26 bp, Homo sapiens
gaagcttctctcttgagcctccatca

SEQ ID NO: 121274 - DNA, 26 bp, Homo sapiens
aagcttctctcttgagcctccatcat

SEQ ID NO: 121275 - DNA, 26 bp, Homo sapiens
agcttctctcttgagcctccatcatt

SEQ ID NO: 121276 - DNA, 26 bp, Homo sapiens
gcttctctcttgagcctccatcattt

SEQ ID NO: 121277 - DNA, 26 bp, Homo sapiens
cttctctcttgagcctccatcatttg

SEQ ID NO: 121278 - DNA, 26 bp, Homo sapiens
ttctctcttgagcctccatcatttgc

SEQ ID NO: 121279 - DNA, 26 bp, Homo sapiens
tctctcttgagcctccatcatttgct

SEQ ID NO: 121280 - DNA, 26 bp, Homo sapiens
ctctcttgagcctccatcatttgctg

SEQ ID NO: 121281 - DNA, 26 bp, Homo sapiens
tctcttgagcctccatcatttgctgc

SEQ ID NO: 121282 - DNA, 26 bp, Homo sapiens
ctcttgagcctccatcatttgctgct

SEQ ID NO: 121283 - DNA, 26 bp, Homo sapiens
tcttgagcctccatcatttgctgctg

SEQ ID NO: 121284 - DNA, 26 bp, Homo sapiens
cttgagcctccatcatttgctgctgc

SEQ ID NO: 121285 - DNA, 26 bp, Homo sapiens
ttgagcctccatcatttgctgctgct

SEQ ID NO: 121286 - DNA, 26 bp, Homo sapiens
tgagcctccatcatttgctgctgctc

SEQ ID NO: 121287 - DNA, 26 bp, Homo sapiens
gagcctccatcatttgctgctgctcc

SEQ ID NO: 121288 - DNA, 26 bp, Homo sapiens
agcctccatcatttgctgctgctcct

SEQ ID NO: 121289 - DNA, 26 bp, Homo sapiens
gcctccatcatttgctgctgctcctt

SEQ ID NO: 121290 - DNA, 26 bp, Homo sapiens
cctccatcatttgctgctgctccttc

SEQ ID NO: 121291 - DNA, 26 bp, Homo sapiens
ctccatcatttgctgctgctccttct

SEQ ID NO: 121292 - DNA, 26 bp, Homo sapiens
tccatcatttgctgctgctccttctg

SEQ ID NO: 121293 - DNA, 26 bp, Homo sapiens
ccatcatttgctgctgctccttctgt

SEQ ID NO: 121294 - DNA, 26 bp, Homo sapiens
catcatttgctgctgctccttctgtt

SEQ ID NO: 121295 - DNA, 26 bp, Homo sapiens
atcatttgctgctgctccttctgttt

SEQ ID NO: 121296 - DNA, 26 bp, Homo sapiens
tcatttgctgctgctccttctgtttt

SEQ ID NO: 121297 - DNA, 26 bp, Homo sapiens
catttgctgctgctccttctgttttt

SEQ ID NO: 121298 - DNA, 26 bp, Homo sapiens
atttgctgctgctccttctgtttttc

SEQ ID NO: 121299 - DNA, 26 bp, Homo sapiens
tttgctgctgctccttctgtttttct

SEQ ID NO: 121300 - DNA, 26 bp, Homo sapiens
ttgctgctgctccttctgtttttctc

SEQ ID NO: 121301 - DNA, 26 bp, Homo sapiens
tgctgctgctccttctgtttttctct

SEQ ID NO: 121302 - DNA, 26 bp, Homo sapiens
gctgctgctccttctgtttttctctt

SEQ ID NO: 121303 - DNA, 26 bp, Homo sapiens
ctgctgctccttctgtttttctctta

SEQ ID NO: 121304 - DNA, 26 bp, Homo sapiens
tgctgctccttctgtttttctcttag

SEQ ID NO: 121305 - DNA, 26 bp, Homo sapiens
gctgctccttctgtttttctcttagc

SEQ ID NO: 121306 - DNA, 26 bp, Homo sapiens
ctgctccttctgtttttctcttagca

SEQ ID NO: 121307 - DNA, 26 bp, Homo sapiens
tgctccttctgtttttctcttagcag

SEQ ID NO: 121308 - DNA, 26 bp, Homo sapiens
gctccttctgtttttctcttagcagc

SEQ ID NO: 121309 - DNA, 26 bp, Homo sapiens
ctccttctgtttttctcttagcagct

SEQ ID NO: 121310 - DNA, 26 bp, Homo sapiens
tccttctgtttttctcttagcagctc

SEQ ID NO: 121311 - DNA, 26 bp, Homo sapiens
ccttctgtttttctcttagcagctcc

SEQ ID NO: 121312 - DNA, 26 bp, Homo sapiens
cttctgtttttctcttagcagctcct

SEQ ID NO: 121313 - DNA, 26 bp, Homo sapiens
ttctgtttttctcttagcagctcctg

SEQ ID NO: 121314 - DNA, 26 bp, Homo sapiens
tctgtttttctcttagcagctcctgt

SEQ ID NO: 121315 - DNA, 26 bp, Homo sapiens
ctgtttttctcttagcagctcctgtt

SEQ ID NO: 121316 - DNA, 26 bp, Homo sapiens
tgtttttctcttagcagctcctgttc

SEQ ID NO: 121317 - DNA, 26 bp, Homo sapiens
gtttttctcttagcagctcctgttcc

SEQ ID NO: 121318 - DNA, 26 bp, Homo sapiens
tttttctcttagcagctcctgttcct

SEQ ID NO: 121319 - DNA, 26 bp, Homo sapiens
ttttctcttagcagctcctgttcctt

SEQ ID NO: 121320 - DNA, 26 bp, Homo sapiens
tttctcttagcagctcctgttccttc

SEQ ID NO: 121321 - DNA, 26 bp, Homo sapiens
ttctcttagcagctcctgttccttct

SEQ ID NO: 121322 - DNA, 26 bp, Homo sapiens
tctcttagcagctcctgttccttctc

SEQ ID NO: 121323 - DNA, 26 bp, Homo sapiens
ctcttagcagctcctgttccttctca

SEQ ID NO: 121324 - DNA, 26 bp, Homo sapiens
tcttagcagctcctgttccttctcag

SEQ ID NO: 121325 - DNA, 26 bp, Homo sapiens
cttagcagctcctgttccttctcagc

SEQ ID NO: 121326 - DNA, 26 bp, Homo sapiens
ttagcagctcctgttccttctcagct

SEQ ID NO: 121327 - DNA, 26 bp, Homo sapiens
tagcagctcctgttccttctcagctg

SEQ ID NO: 121328 - DNA, 26 bp, Homo sapiens
agcagctcctgttccttctcagctgc

SEQ ID NO: 121329 - DNA, 26 bp, Homo sapiens
gcagctcctgttccttctcagctgct

SEQ ID NO: 121330 - DNA, 26 bp, Homo sapiens
cagctcctgttccttctcagctgctt

SEQ ID NO: 121331 - DNA, 26 bp, Homo sapiens
agctcctgttccttctcagctgcttc

SEQ ID NO: 121332 - DNA, 26 bp, Homo sapiens
gctcctgttccttctcagctgcttcc

SEQ ID NO: 121333 - DNA, 26 bp, Homo sapiens
ctcctgttccttctcagctgcttcct

SEQ ID NO: 121334 - DNA, 26 bp, Homo sapiens
tcctgttccttctcagctgcttcctt

SEQ ID NO: 121335 - DNA, 26 bp, Homo sapiens
cctgttccttctcagctgcttccttc

SEQ ID NO: 121336 - DNA, 26 bp, Homo sapiens
ctgttccttctcagctgcttccttca

SEQ ID NO: 121337 - DNA, 26 bp, Homo sapiens
tgttccttctcagctgcttccttcat

SEQ ID NO: 121338 - DNA, 26 bp, Homo sapiens
gttccttctcagctgcttccttcatg

SEQ ID NO: 121339 - DNA, 26 bp, Homo sapiens
ttccttctcagctgcttccttcatgg

SEQ ID NO: 121340 - DNA, 26 bp, Homo sapiens
tccttctcagctgcttccttcatggc

SEQ ID NO: 121341 - DNA, 26 bp, Homo sapiens
ccttctcagctgcttccttcatggcc

SEQ ID NO: 121342 - DNA, 26 bp, Homo sapiens
cttctcagctgcttccttcatggccc

SEQ ID NO: 121343 - DNA, 26 bp, Homo sapiens
ttctcagctgcttccttcatggcccg

SEQ ID NO: 121344 - DNA, 26 bp, Homo sapiens
tctcagctgcttccttcatggcccgc

SEQ ID NO: 121345 - DNA, 26 bp, Homo sapiens
ctcagctgcttccttcatggcccgct

SEQ ID NO: 121346 - DNA, 26 bp, Homo sapiens
tcagctgcttccttcatggcccgctc

SEQ ID NO: 121347 - DNA, 26 bp, Homo sapiens
cagctgcttccttcatggcccgctcc

SEQ ID NO: 121348 - DNA, 26 bp, Homo sapiens
agctgcttccttcatggcccgctccg

SEQ ID NO: 121349 - DNA, 26 bp, Homo sapiens
gctgcttccttcatggcccgctccgc

SEQ ID NO: 121350 - DNA, 26 bp, Homo sapiens
ctgcttccttcatggcccgctccgct

SEQ ID NO: 121351 - DNA, 26 bp, Homo sapiens
tgcttccttcatggcccgctccgctg

SEQ ID NO: 121352 - DNA, 26 bp, Homo sapiens
gcttccttcatggcccgctccgctgc

SEQ ID NO: 121353 - DNA, 26 bp, Homo sapiens
cttccttcatggcccgctccgctgct

SEQ ID NO: 121354 - DNA, 26 bp, Homo sapiens
ttccttcatggcccgctccgctgcta

SEQ ID NO: 121355 - DNA, 26 bp, Homo sapiens
tccttcatggcccgctccgctgctat

SEQ ID NO: 121356 - DNA, 26 bp, Homo sapiens
ccttcatggcccgctccgctgctatg

SEQ ID NO: 121357 - DNA, 26 bp, Homo sapiens
cttcatggcccgctccgctgctatgg

SEQ ID NO: 121358 - DNA, 26 bp, Homo sapiens
ttcatggcccgctccgctgctatggc

SEQ ID NO: 121359 - DNA, 26 bp, Homo sapiens
tcatggcccgctccgctgctatggcc

SEQ ID NO: 121360 - DNA, 26 bp, Homo sapiens
catggcccgctccgctgctatggcct

SEQ ID NO: 121361 - DNA, 26 bp, Homo sapiens
atggcccgctccgctgctatggcctt

SEQ ID NO: 121362 - DNA, 26 bp, Homo sapiens
tggcccgctccgctgctatggccttc

SEQ ID NO: 121363 - DNA, 26 bp, Homo sapiens
ggcccgctccgctgctatggccttct

SEQ ID NO: 121364 - DNA, 26 bp, Homo sapiens
gcccgctccgctgctatggccttctc

SEQ ID NO: 121365 - DNA, 26 bp, Homo sapiens
cccgctccgctgctatggccttctct

SEQ ID NO: 121366 - DNA, 26 bp, Homo sapiens
ccgctccgctgctatggccttctctc

SEQ ID NO: 121367 - DNA, 26 bp, Homo sapiens
cgctccgctgctatggccttctctcc

SEQ ID NO: 121368 - DNA, 26 bp, Homo sapiens
gctccgctgctatggccttctctcca

SEQ ID NO: 121369 - DNA, 26 bp, Homo sapiens
ctccgctgctatggccttctctccag

SEQ ID NO: 121370 - DNA, 26 bp, Homo sapiens
tccgctgctatggccttctctccagc

SEQ ID NO: 121371 - DNA, 26 bp, Homo sapiens
ccgctgctatggccttctctccagca

SEQ ID NO: 121372 - DNA, 26 bp, Homo sapiens
cgctgctatggccttctctccagcag

SEQ ID NO: 121373 - DNA, 26 bp, Homo sapiens
gctgctatggccttctctccagcagt

SEQ ID NO: 121374 - DNA, 26 bp, Homo sapiens
ctgctatggccttctctccagcagtg

SEQ ID NO: 121375 - DNA, 26 bp, Homo sapiens
tgctatggccttctctccagcagtga

SEQ ID NO: 121376 - DNA, 26 bp, Homo sapiens
gctatggccttctctccagcagtgag

SEQ ID NO: 121377 - DNA, 26 bp, Homo sapiens
ctatggccttctctccagcagtgagg

SEQ ID NO: 121378 - DNA, 26 bp, Homo sapiens
tatggccttctctccagcagtgaggg

SEQ ID NO: 121379 - DNA, 26 bp, Homo sapiens
atggccttctctccagcagtgagggc

SEQ ID NO: 121380 - DNA, 26 bp, Homo sapiens
tggccttctctccagcagtgagggct

SEQ ID NO: 121381 - DNA, 26 bp, Homo sapiens
ggccttctctccagcagtgagggctt

SEQ ID NO: 121382 - DNA, 26 bp, Homo sapiens
gccttctctccagcagtgagggcttt

SEQ ID NO: 121383 - DNA, 26 bp, Homo sapiens
ccttctctccagcagtgagggctttg

SEQ ID NO: 121384 - DNA, 26 bp, Homo sapiens
cttctctccagcagtgagggctttgt

SEQ ID NO: 121385 - DNA, 26 bp, Homo sapiens
ttctctccagcagtgagggctttgtc

SEQ ID NO: 121386 - DNA, 26 bp, Homo sapiens
tctctccagcagtgagggctttgtct

SEQ ID NO: 121387 - DNA, 26 bp, Homo sapiens
ctctccagcagtgagggctttgtctg

SEQ ID NO: 121388 - DNA, 26 bp, Homo sapiens
tctccagcagtgagggctttgtctga

SEQ ID NO: 121389 - DNA, 26 bp, Homo sapiens
ctccagcagtgagggctttgtctgac

SEQ ID NO: 121390 - DNA, 26 bp, Homo sapiens
tccagcagtgagggctttgtctgact

SEQ ID NO: 121391 - DNA, 26 bp, Homo sapiens
ccagcagtgagggctttgtctgactg

SEQ ID NO: 121392 - DNA, 26 bp, Homo sapiens
cagcagtgagggctttgtctgactgc

SEQ ID NO: 121393 - DNA, 26 bp, Homo sapiens
agcagtgagggctttgtctgactgca

SEQ ID NO: 121394 - DNA, 26 bp, Homo sapiens
gcagtgagggctttgtctgactgcag

SEQ ID NO: 121395 - DNA, 26 bp, Homo sapiens
cagtgagggctttgtctgactgcagg

SEQ ID NO: 121396 - DNA, 26 bp, Homo sapiens
agtgagggctttgtctgactgcagga

SEQ ID NO: 121397 - DNA, 26 bp, Homo sapiens
gtgagggctttgtctgactgcaggat

SEQ ID NO: 121398 - DNA, 26 bp, Homo sapiens
tgagggctttgtctgactgcaggatg

SEQ ID NO: 121399 - DNA, 26 bp, Homo sapiens
gagggctttgtctgactgcaggatgg

SEQ ID NO: 121400 - DNA, 26 bp, Homo sapiens
agggctttgtctgactgcaggatgga

SEQ ID NO: 121401 - DNA, 26 bp, Homo sapiens
gggctttgtctgactgcaggatggat

SEQ ID NO: 121402 - DNA, 26 bp, Homo sapiens
ggctttgtctgactgcaggatggatt

SEQ ID NO: 121403 - DNA, 26 bp, Homo sapiens
gctttgtctgactgcaggatggattc

SEQ ID NO: 121404 - DNA, 26 bp, Homo sapiens
ctttgtctgactgcaggatggattcc

SEQ ID NO: 121405 - DNA, 26 bp, Homo sapiens
tttgtctgactgcaggatggattcct

SEQ ID NO: 121406 - DNA, 26 bp, Homo sapiens
ttgtctgactgcaggatggattcctc

SEQ ID NO: 121407 - DNA, 26 bp, Homo sapiens
tgtctgactgcaggatggattcctct

SEQ ID NO: 121408 - DNA, 26 bp, Homo sapiens
gtctgactgcaggatggattcctcta

SEQ ID NO: 121409 - DNA, 26 bp, Homo sapiens
tctgactgcaggatggattcctctac

SEQ ID NO: 121410 - DNA, 26 bp, Homo sapiens
ctgactgcaggatggattcctctaca

SEQ ID NO: 121411 - DNA, 26 bp, Homo sapiens
tgactgcaggatggattcctctacaa

SEQ ID NO: 121412 - DNA, 26 bp, Homo sapiens
gactgcaggatggattcctctacaac

SEQ ID NO: 121413 - DNA, 26 bp, Homo sapiens
actgcaggatggattcctctacaacc

SEQ ID NO: 121414 - DNA, 26 bp, Homo sapiens
ctgcaggatggattcctctacaacca

SEQ ID NO: 121415 - DNA, 26 bp, Homo sapiens
tgcaggatggattcctctacaaccac

SEQ ID NO: 121416 - DNA, 26 bp, Homo sapiens
gcaggatggattcctctacaaccacc

SEQ ID NO: 121417 - DNA, 26 bp, Homo sapiens
caggatggattcctctacaaccacct

SEQ ID NO: 121418 - DNA, 26 bp, Homo sapiens
aggatggattcctctacaaccacctg

SEQ ID NO: 121419 - DNA, 26 bp, Homo sapiens
ggatggattcctctacaaccacctgt

SEQ ID NO: 121420 - DNA, 26 bp, Homo sapiens
gatggattcctctacaaccacctgtg

SEQ ID NO: 121421 - DNA, 26 bp, Homo sapiens
atggattcctctacaaccacctgtga

SEQ ID NO: 121422 - DNA, 26 bp, Homo sapiens
tggattcctctacaaccacctgtgac

SEQ ID NO: 121423 - DNA, 26 bp, Homo sapiens
ggattcctctacaaccacctgtgact

SEQ ID NO: 121424 - DNA, 26 bp, Homo sapiens
gattcctctacaaccacctgtgactg

SEQ ID NO: 121425 - DNA, 26 bp, Homo sapiens
attcctctacaaccacctgtgactgc

SEQ ID NO: 121426 - DNA, 26 bp, Homo sapiens
ttcctctacaaccacctgtgactgca

SEQ ID NO: 121427 - DNA, 26 bp, Homo sapiens
tcctctacaaccacctgtgactgcag

SEQ ID NO: 121428 - DNA, 26 bp, Homo sapiens
cctctacaaccacctgtgactgcagg

SEQ ID NO: 121429 - DNA, 26 bp, Homo sapiens
ctctacaaccacctgtgactgcagga

SEQ ID NO: 121430 - DNA, 26 bp, Homo sapiens
tctacaaccacctgtgactgcaggaa

SEQ ID NO: 121431 - DNA, 26 bp, Homo sapiens
ctacaaccacctgtgactgcaggaag

SEQ ID NO: 121432 - DNA, 26 bp, Homo sapiens
tacaaccacctgtgactgcaggaagt

SEQ ID NO: 121433 - DNA, 26 bp, Homo sapiens
acaaccacctgtgactgcaggaagtt

SEQ ID NO: 121434 - DNA, 26 bp, Homo sapiens
caaccacctgtgactgcaggaagttc

SEQ ID NO: 121435 - DNA, 26 bp, Homo sapiens
aaccacctgtgactgcaggaagttct

SEQ ID NO: 121436 - DNA, 26 bp, Homo sapiens
accacctgtgactgcaggaagttctg

SEQ ID NO: 121437 - DNA, 26 bp, Homo sapiens
ccacctgtgactgcaggaagttctgg

SEQ ID NO: 121438 - DNA, 26 bp, Homo sapiens
cacctgtgactgcaggaagttctgga

SEQ ID NO: 121439 - DNA, 26 bp, Homo sapiens
acctgtgactgcaggaagttctggag

SEQ ID NO: 121440 - DNA, 26 bp, Homo sapiens
cctgtgactgcaggaagttctggagg

SEQ ID NO: 121441 - DNA, 26 bp, Homo sapiens
ctgtgactgcaggaagttctggagga

SEQ ID NO: 121442 - DNA, 26 bp, Homo sapiens
tgtgactgcaggaagttctggaggac

SEQ ID NO: 121443 - DNA, 26 bp, Homo sapiens
gtgactgcaggaagttctggaggacc

SEQ ID NO: 121444 - DNA, 26 bp, Homo sapiens
tgactgcaggaagttctggaggacct

SEQ ID NO: 121445 - DNA, 26 bp, Homo sapiens
gactgcaggaagttctggaggacctc

SEQ ID NO: 121446 - DNA, 26 bp, Homo sapiens
actgcaggaagttctggaggacctcg

SEQ ID NO: 121447 - DNA, 26 bp, Homo sapiens
ctgcaggaagttctggaggacctcgt

SEQ ID NO: 121448 - DNA, 26 bp, Homo sapiens
tgcaggaagttctggaggacctcgtt

SEQ ID NO: 121449 - DNA, 26 bp, Homo sapiens
gcaggaagttctggaggacctcgttt

SEQ ID NO: 121450 - DNA, 26 bp, Homo sapiens
caggaagttctggaggacctcgtttg

SEQ ID NO: 121451 - DNA, 26 bp, Homo sapiens
aggaagttctggaggacctcgtttgc

SEQ ID NO: 121452 - DNA, 26 bp, Homo sapiens
ggaagttctggaggacctcgtttgcc

SEQ ID NO: 121453 - DNA, 26 bp, Homo sapiens
gaagttctggaggacctcgtttgcct

SEQ ID NO: 121454 - DNA, 26 bp, Homo sapiens
aagttctggaggacctcgtttgcctt

SEQ ID NO: 121455 - DNA, 26 bp, Homo sapiens
agttctggaggacctcgtttgcctta

SEQ ID NO: 121456 - DNA, 26 bp, Homo sapiens
gttctggaggacctcgtttgccttaa

SEQ ID NO: 121457 - DNA, 26 bp, Homo sapiens
ttctggaggacctcgtttgccttaac

SEQ ID NO: 121458 - DNA, 26 bp, Homo sapiens
tctggaggacctcgtttgccttaact

SEQ ID NO: 121459 - DNA, 26 bp, Homo sapiens
ctggaggacctcgtttgccttaactc

SEQ ID NO: 121460 - DNA, 26 bp, Homo sapiens
tggaggacctcgtttgccttaactcc

SEQ ID NO: 121461 - DNA, 26 bp, Homo sapiens
ggaggacctcgtttgccttaactcct

SEQ ID NO: 121462 - DNA, 26 bp, Homo sapiens
gaggacctcgtttgccttaactcctt

SEQ ID NO: 121463 - DNA, 26 bp, Homo sapiens
aggacctcgtttgccttaactccttt

SEQ ID NO: 121464 - DNA, 26 bp, Homo sapiens
ggacctcgtttgccttaactcctttt

SEQ ID NO: 121465 - DNA, 26 bp, Homo sapiens
gacctcgtttgccttaactccttttc

SEQ ID NO: 121466 - DNA, 26 bp, Homo sapiens
acctcgtttgccttaactccttttct

SEQ ID NO: 121467 - DNA, 26 bp, Homo sapiens
cctcgtttgccttaactccttttctg

SEQ ID NO: 121468 - DNA, 26 bp, Homo sapiens
ctcgtttgccttaactccttttctgg

SEQ ID NO: 121469 - DNA, 26 bp, Homo sapiens
tcgtttgccttaactccttttctggg

SEQ ID NO: 121470 - DNA, 26 bp, Homo sapiens
cgtttgccttaactccttttctgggc

SEQ ID NO: 121471 - DNA, 26 bp, Homo sapiens
gtttgccttaactccttttctgggca

SEQ ID NO: 121472 - DNA, 26 bp, Homo sapiens
tttgccttaactccttttctgggcac

SEQ ID NO: 121473 - DNA, 26 bp, Homo sapiens
ttgccttaactccttttctgggcact

SEQ ID NO: 121474 - DNA, 26 bp, Homo sapiens
tgccttaactccttttctgggcacta

SEQ ID NO: 121475 - DNA, 26 bp, Homo sapiens
gccttaactccttttctgggcactag

SEQ ID NO: 121476 - DNA, 26 bp, Homo sapiens
ccttaactccttttctgggcactagc

SEQ ID NO: 121477 - DNA, 26 bp, Homo sapiens
cttaactccttttctgggcactagct

SEQ ID NO: 121478 - DNA, 26 bp, Homo sapiens
ttaactccttttctgggcactagctt

SEQ ID NO: 121479 - DNA, 26 bp, Homo sapiens
taactccttttctgggcactagctta

SEQ ID NO: 121480 - DNA, 26 bp, Homo sapiens
aactccttttctgggcactagcttat

SEQ ID NO: 121481 - DNA, 26 bp, Homo sapiens
actccttttctgggcactagcttata

SEQ ID NO: 121482 - DNA, 26 bp, Homo sapiens
ctccttttctgggcactagcttatag

SEQ ID NO: 121483 - DNA, 26 bp, Homo sapiens
tccttttctgggcactagcttatagt

SEQ ID NO: 121484 - DNA, 26 bp, Homo sapiens
ccttttctgggcactagcttatagtc

SEQ ID NO: 121485 - DNA, 26 bp, Homo sapiens
cttttctgggcactagcttatagtcc

SEQ ID NO: 121486 - DNA, 26 bp, Homo sapiens
ttttctgggcactagcttatagtccc

SEQ ID NO: 121487 - DNA, 26 bp, Homo sapiens
tttctgggcactagcttatagtccca

SEQ ID NO: 121488 - DNA, 26 bp, Homo sapiens
ttctgggcactagcttatagtcccac

SEQ ID NO: 121489 - DNA, 26 bp, Homo sapiens
tctgggcactagcttatagtcccact

SEQ ID NO: 121490 - DNA, 26 bp, Homo sapiens
ctgggcactagcttatagtcccactc

SEQ ID NO: 121491 - DNA, 26 bp, Homo sapiens
tgggcactagcttatagtcccactca

SEQ ID NO: 121492 - DNA, 26 bp, Homo sapiens
gggcactagcttatagtcccactcaa

SEQ ID NO: 121493 - DNA, 26 bp, Homo sapiens
ggcactagcttatagtcccactcaac

SEQ ID NO: 121494 - DNA, 26 bp, Homo sapiens
gcactagcttatagtcccactcaacc

SEQ ID NO: 121495 - DNA, 26 bp, Homo sapiens
cactagcttatagtcccactcaacct

SEQ ID NO: 121496 - DNA, 26 bp, Homo sapiens
actagcttatagtcccactcaacctg

SEQ ID NO: 121497 - DNA, 26 bp, Homo sapiens
ctagcttatagtcccactcaacctgt

SEQ ID NO: 121498 - DNA, 26 bp, Homo sapiens
tagcttatagtcccactcaacctgtt

SEQ ID NO: 121499 - DNA, 26 bp, Homo sapiens
agcttatagtcccactcaacctgttt

SEQ ID NO: 121500 - DNA, 26 bp, Homo sapiens
gcttatagtcccactcaacctgtttc

SEQ ID NO: 121501 - DNA, 26 bp, Homo sapiens
cttatagtcccactcaacctgtttct

SEQ ID NO: 121502 - DNA, 26 bp, Homo sapiens
ttatagtcccactcaacctgtttctt

SEQ ID NO: 121503 - DNA, 26 bp, Homo sapiens
tatagtcccactcaacctgtttcttt

SEQ ID NO: 121504 - DNA, 26 bp, Homo sapiens
atagtcccactcaacctgtttctttt

SEQ ID NO: 121505 - DNA, 26 bp, Homo sapiens
tagtcccactcaacctgtttcttttc

SEQ ID NO: 121506 - DNA, 26 bp, Homo sapiens
agtcccactcaacctgtttcttttct

SEQ ID NO: 121507 - DNA, 26 bp, Homo sapiens
gtcccactcaacctgtttcttttctt

SEQ ID NO: 121508 - DNA, 26 bp, Homo sapiens
tcccactcaacctgtttcttttcttc

SEQ ID NO: 121509 - DNA, 26 bp, Homo sapiens
cccactcaacctgtttcttttcttct

SEQ ID NO: 121510 - DNA, 26 bp, Homo sapiens
ccactcaacctgtttcttttcttcta

SEQ ID NO: 121511 - DNA, 26 bp, Homo sapiens
cactcaacctgtttcttttcttctaa

SEQ ID NO: 121512 - DNA, 26 bp, Homo sapiens
actcaacctgtttcttttcttctaag

SEQ ID NO: 121513 - DNA, 26 bp, Homo sapiens
ctcaacctgtttcttttcttctaagt

SEQ ID NO: 121514 - DNA, 26 bp, Homo sapiens
tcaacctgtttcttttcttctaagta

SEQ ID NO: 121515 - DNA, 26 bp, Homo sapiens
caacctgtttcttttcttctaagtag

SEQ ID NO: 121516 - DNA, 26 bp, Homo sapiens
aacctgtttcttttcttctaagtaga

SEQ ID NO: 121517 - DNA, 26 bp, Homo sapiens
acctgtttcttttcttctaagtagag

SEQ ID NO: 121518 - DNA, 26 bp, Homo sapiens
cctgtttcttttcttctaagtagaga

SEQ ID NO: 121519 - DNA, 26 bp, Homo sapiens
ctgtttcttttcttctaagtagagat

SEQ ID NO: 121520 - DNA, 26 bp, Homo sapiens
tgtttcttttcttctaagtagagatt

SEQ ID NO: 121521 - DNA, 26 bp, Homo sapiens
gtttcttttcttctaagtagagattg

SEQ ID NO: 121522 - DNA, 26 bp, Homo sapiens
tttcttttcttctaagtagagattgt

SEQ ID NO: 121523 - DNA, 26 bp, Homo sapiens
ttcttttcttctaagtagagattgtg

SEQ ID NO: 121524 - DNA, 26 bp, Homo sapiens
tcttttcttctaagtagagattgtgt

SEQ ID NO: 121525 - DNA, 26 bp, Homo sapiens
cttttcttctaagtagagattgtgtc

SEQ ID NO: 121526 - DNA, 26 bp, Homo sapiens
ttttcttctaagtagagattgtgtcc

SEQ ID NO: 121527 - DNA, 26 bp, Homo sapiens
tttcttctaagtagagattgtgtcct

SEQ ID NO: 121528 - DNA, 26 bp, Homo sapiens
ttcttctaagtagagattgtgtcctc

SEQ ID NO: 121529 - DNA, 26 bp, Homo sapiens
tcttctaagtagagattgtgtcctcc

SEQ ID NO: 121530 - DNA, 26 bp, Homo sapiens
cttctaagtagagattgtgtcctcca

SEQ ID NO: 121531 - DNA, 26 bp, Homo sapiens
ttctaagtagagattgtgtcctccag

SEQ ID NO: 121532 - DNA, 26 bp, Homo sapiens
tctaagtagagattgtgtcctccagg

SEQ ID NO: 121533 - DNA, 26 bp, Homo sapiens
ctaagtagagattgtgtcctccagga

SEQ ID NO: 121534 - DNA, 26 bp, Homo sapiens
taagtagagattgtgtcctccaggaa

SEQ ID NO: 121535 - DNA, 26 bp, Homo sapiens
aagtagagattgtgtcctccaggaac

SEQ ID NO: 121536 - DNA, 26 bp, Homo sapiens
agtagagattgtgtcctccaggaaca

SEQ ID NO: 121537 - DNA, 26 bp, Homo sapiens
gtagagattgtgtcctccaggaacag

SEQ ID NO: 121538 - DNA, 26 bp, Homo sapiens
tagagattgtgtcctccaggaacaga

SEQ ID NO: 121539 - DNA, 26 bp, Homo sapiens
agagattgtgtcctccaggaacagag

SEQ ID NO: 121540 - DNA, 26 bp, Homo sapiens
gagattgtgtcctccaggaacagaga

SEQ ID NO: 121541 - DNA, 26 bp, Homo sapiens
agattgtgtcctccaggaacagagaa

SEQ ID NO: 121542 - DNA, 26 bp, Homo sapiens
gattgtgtcctccaggaacagagaaa

SEQ ID NO: 121543 - DNA, 26 bp, Homo sapiens
attgtgtcctccaggaacagagaaaa

SEQ ID NO: 121544 - DNA, 26 bp, Homo sapiens
ttgtgtcctccaggaacagagaaaat

SEQ ID NO: 121545 - DNA, 26 bp, Homo sapiens
tgtgtcctccaggaacagagaaaatt

SEQ ID NO: 121546 - DNA, 26 bp, Homo sapiens
gtgtcctccaggaacagagaaaattc

SEQ ID NO: 121547 - DNA, 26 bp, Homo sapiens
tgtcctccaggaacagagaaaattcc

SEQ ID NO: 121548 - DNA, 26 bp, Homo sapiens
gtcctccaggaacagagaaaattcct

SEQ ID NO: 121549 - DNA, 26 bp, Homo sapiens
tcctccaggaacagagaaaattcctc

SEQ ID NO: 121550 - DNA, 26 bp, Homo sapiens
cctccaggaacagagaaaattcctct

SEQ ID NO: 121551 - DNA, 26 bp, Homo sapiens
ctccaggaacagagaaaattcctctc

SEQ ID NO: 121552 - DNA, 26 bp, Homo sapiens
tccaggaacagagaaaattcctctca

SEQ ID NO: 121553 - DNA, 26 bp, Homo sapiens
ccaggaacagagaaaattcctctcaa

SEQ ID NO: 121554 - DNA, 26 bp, Homo sapiens
caggaacagagaaaattcctctcaaa

SEQ ID NO: 121555 - DNA, 26 bp, Homo sapiens
aggaacagagaaaattcctctcaaaa

SEQ ID NO: 121556 - DNA, 26 bp, Homo sapiens
ggaacagagaaaattcctctcaaaat

SEQ ID NO: 121557 - DNA, 26 bp, Homo sapiens
gaacagagaaaattcctctcaaaatg

SEQ ID NO: 121558 - DNA, 26 bp, Homo sapiens
aacagagaaaattcctctcaaaatgc

SEQ ID NO: 121559 - DNA, 26 bp, Homo sapiens
acagagaaaattcctctcaaaatgct

SEQ ID NO: 121560 - DNA, 26 bp, Homo sapiens
cagagaaaattcctctcaaaatgctt

SEQ ID NO: 121561 - DNA, 26 bp, Homo sapiens
agagaaaattcctctcaaaatgcttt

SEQ ID NO: 121562 - DNA, 26 bp, Homo sapiens
gagaaaattcctctcaaaatgctttc

SEQ ID NO: 121563 - DNA, 26 bp, Homo sapiens
agaaaattcctctcaaaatgctttct

SEQ ID NO: 121564 - DNA, 26 bp, Homo sapiens
gaaaattcctctcaaaatgctttctg

SEQ ID NO: 121565 - DNA, 26 bp, Homo sapiens
aaaattcctctcaaaatgctttctgt

SEQ ID NO: 121566 - DNA, 26 bp, Homo sapiens
aaattcctctcaaaatgctttctgtc

SEQ ID NO: 121567 - DNA, 26 bp, Homo sapiens
aattcctctcaaaatgctttctgtca

SEQ ID NO: 121568 - DNA, 26 bp, Homo sapiens
attcctctcaaaatgctttctgtcag

SEQ ID NO: 121569 - DNA, 26 bp, Homo sapiens
ttcctctcaaaatgctttctgtcagg

SEQ ID NO: 121570 - DNA, 26 bp, Homo sapiens
tcctctcaaaatgctttctgtcaggt

SEQ ID NO: 121571 - DNA, 26 bp, Homo sapiens
cctctcaaaatgctttctgtcaggtg

SEQ ID NO: 121572 - DNA, 26 bp, Homo sapiens
ctctcaaaatgctttctgtcaggtgc

SEQ ID NO: 121573 - DNA, 26 bp, Homo sapiens
tctcaaaatgctttctgtcaggtgct

SEQ ID NO: 121574 - DNA, 26 bp, Homo sapiens
ctcaaaatgctttctgtcaggtgctc

SEQ ID NO: 121575 - DNA, 26 bp, Homo sapiens
tcaaaatgctttctgtcaggtgctct

SEQ ID NO: 121576 - DNA, 26 bp, Homo sapiens
caaaatgctttctgtcaggtgctctg

SEQ ID NO: 121577 - DNA, 26 bp, Homo sapiens
aaaatgctttctgtcaggtgctctga

SEQ ID NO: 121578 - DNA, 26 bp, Homo sapiens
aaatgctttctgtcaggtgctctgaa

SEQ ID NO: 121579 - DNA, 26 bp, Homo sapiens
aatgctttctgtcaggtgctctgaaa

SEQ ID NO: 121580 - DNA, 26 bp, Homo sapiens
atgctttctgtcaggtgctctgaaag

SEQ ID NO: 121581 - DNA, 26 bp, Homo sapiens
tgctttctgtcaggtgctctgaaagc

SEQ ID NO: 121582 - DNA, 26 bp, Homo sapiens
gctttctgtcaggtgctctgaaagcc

SEQ ID NO: 121583 - DNA, 26 bp, Homo sapiens
ctttctgtcaggtgctctgaaagccg

SEQ ID NO: 121584 - DNA, 26 bp, Homo sapiens
tttctgtcaggtgctctgaaagccgc

SEQ ID NO: 121585 - DNA, 26 bp, Homo sapiens
ttctgtcaggtgctctgaaagccgct

SEQ ID NO: 121586 - DNA, 26 bp, Homo sapiens
tctgtcaggtgctctgaaagccgctt

SEQ ID NO: 121587 - DNA, 26 bp, Homo sapiens
ctgtcaggtgctctgaaagccgctta

SEQ ID NO: 121588 - DNA, 26 bp, Homo sapiens
tgtcaggtgctctgaaagccgcttaa

SEQ ID NO: 121589 - DNA, 26 bp, Homo sapiens
gtcaggtgctctgaaagccgcttaag

SEQ ID NO: 121590 - DNA, 26 bp, Homo sapiens
tcaggtgctctgaaagccgcttaagc

SEQ ID NO: 121591 - DNA, 26 bp, Homo sapiens
caggtgctctgaaagccgcttaagct

SEQ ID NO: 121592 - DNA, 26 bp, Homo sapiens
aggtgctctgaaagccgcttaagctc

SEQ ID NO: 121593 - DNA, 26 bp, Homo sapiens
ggtgctctgaaagccgcttaagctca

SEQ ID NO: 121594 - DNA, 26 bp, Homo sapiens
gtgctctgaaagccgcttaagctcag

SEQ ID NO: 121595 - DNA, 26 bp, Homo sapiens
tgctctgaaagccgcttaagctcagc

SEQ ID NO: 121596 - DNA, 26 bp, Homo sapiens
gctctgaaagccgcttaagctcagcc

SEQ ID NO: 121597 - DNA, 26 bp, Homo sapiens
ctctgaaagccgcttaagctcagcct

SEQ ID NO: 121598 - DNA, 26 bp, Homo sapiens
tctgaaagccgcttaagctcagcctg

SEQ ID NO: 121599 - DNA, 26 bp, Homo sapiens
ctgaaagccgcttaagctcagcctgg

SEQ ID NO: 121600 - DNA, 26 bp, Homo sapiens
tgaaagccgcttaagctcagcctggc

SEQ ID NO: 121601 - DNA, 26 bp, Homo sapiens
gaaagccgcttaagctcagcctggca

SEQ ID NO: 121602 - DNA, 26 bp, Homo sapiens
aaagccgcttaagctcagcctggcaa

SEQ ID NO: 121603 - DNA, 26 bp, Homo sapiens
aagccgcttaagctcagcctggcaat

SEQ ID NO: 121604 - DNA, 26 bp, Homo sapiens
agccgcttaagctcagcctggcaata

SEQ ID NO: 121605 - DNA, 26 bp, Homo sapiens
gccgcttaagctcagcctggcaatat

SEQ ID NO: 121606 - DNA, 26 bp, Homo sapiens
ccgcttaagctcagcctggcaatatt

SEQ ID NO: 121607 - DNA, 26 bp, Homo sapiens
cgcttaagctcagcctggcaatattt

SEQ ID NO: 121608 - DNA, 26 bp, Homo sapiens
gcttaagctcagcctggcaatatttg

SEQ ID NO: 121609 - DNA, 26 bp, Homo sapiens
cttaagctcagcctggcaatatttgg

SEQ ID NO: 121610 - DNA, 26 bp, Homo sapiens
ttaagctcagcctggcaatatttggc

SEQ ID NO: 121611 - DNA, 26 bp, Homo sapiens
taagctcagcctggcaatatttggca

SEQ ID NO: 121612 - DNA, 26 bp, Homo sapiens
aagctcagcctggcaatatttggcag

SEQ ID NO: 121613 - DNA, 26 bp, Homo sapiens
agctcagcctggcaatatttggcaga

SEQ ID NO: 121614 - DNA, 26 bp, Homo sapiens
gctcagcctggcaatatttggcagat

SEQ ID NO: 121615 - DNA, 26 bp, Homo sapiens
ctcagcctggcaatatttggcagatg

SEQ ID NO: 121616 - DNA, 26 bp, Homo sapiens
tcagcctggcaatatttggcagatgc

SEQ ID NO: 121617 - DNA, 26 bp, Homo sapiens
cagcctggcaatatttggcagatgcc

SEQ ID NO: 121618 - DNA, 26 bp, Homo sapiens
agcctggcaatatttggcagatgcct

SEQ ID NO: 121619 - DNA, 26 bp, Homo sapiens
gcctggcaatatttggcagatgcctc

SEQ ID NO: 121620 - DNA, 26 bp, Homo sapiens
cctggcaatatttggcagatgcctct

SEQ ID NO: 121621 - DNA, 26 bp, Homo sapiens
ctggcaatatttggcagatgcctctt

SEQ ID NO: 121622 - DNA, 26 bp, Homo sapiens
tggcaatatttggcagatgcctcttc

SEQ ID NO: 121623 - DNA, 26 bp, Homo sapiens
ggcaatatttggcagatgcctcttca

SEQ ID NO: 121624 - DNA, 26 bp, Homo sapiens
gcaatatttggcagatgcctcttcat

SEQ ID NO: 121625 - DNA, 26 bp, Homo sapiens
caatatttggcagatgcctcttcatt

SEQ ID NO: 121626 - DNA, 26 bp, Homo sapiens
aatatttggcagatgcctcttcattc

SEQ ID NO: 121627 - DNA, 26 bp, Homo sapiens
atatttggcagatgcctcttcattct

SEQ ID NO: 121628 - DNA, 26 bp, Homo sapiens
tatttggcagatgcctcttcattctg

SEQ ID NO: 121629 - DNA, 26 bp, Homo sapiens
atttggcagatgcctcttcattctgc

SEQ ID NO: 121630 - DNA, 26 bp, Homo sapiens
tttggcagatgcctcttcattctgca

SEQ ID NO: 121631 - DNA, 26 bp, Homo sapiens
ttggcagatgcctcttcattctgcag

SEQ ID NO: 121632 - DNA, 26 bp, Homo sapiens
tggcagatgcctcttcattctgcagc

SEQ ID NO: 121633 - DNA, 26 bp, Homo sapiens
ggcagatgcctcttcattctgcagca

SEQ ID NO: 121634 - DNA, 26 bp, Homo sapiens
gcagatgcctcttcattctgcagcac

SEQ ID NO: 121635 - DNA, 26 bp, Homo sapiens
cagatgcctcttcattctgcagcaca

SEQ ID NO: 121636 - DNA, 26 bp, Homo sapiens
agatgcctcttcattctgcagcacaa

SEQ ID NO: 121637 - DNA, 26 bp, Homo sapiens
gatgcctcttcattctgcagcacaaa

SEQ ID NO: 121638 - DNA, 26 bp, Homo sapiens
atgcctcttcattctgcagcacaaag

SEQ ID NO: 121639 - DNA, 26 bp, Homo sapiens
tgcctcttcattctgcagcacaaagt

SEQ ID NO: 121640 - DNA, 26 bp, Homo sapiens
gcctcttcattctgcagcacaaagtc

SEQ ID NO: 121641 - DNA, 26 bp, Homo sapiens
cctcttcattctgcagcacaaagtct

SEQ ID NO: 121642 - DNA, 26 bp, Homo sapiens
ctcttcattctgcagcacaaagtctc

SEQ ID NO: 121643 - DNA, 26 bp, Homo sapiens
tcttcattctgcagcacaaagtctcc

SEQ ID NO: 121644 - DNA, 26 bp, Homo sapiens
cttcattctgcagcacaaagtctccc

SEQ ID NO: 121645 - DNA, 26 bp, Homo sapiens
ttcattctgcagcacaaagtctccct

SEQ ID NO: 121646 - DNA, 26 bp, Homo sapiens
tcattctgcagcacaaagtctccctt

SEQ ID NO: 121647 - DNA, 26 bp, Homo sapiens
cattctgcagcacaaagtctcccttc

SEQ ID NO: 121648 - DNA, 26 bp, Homo sapiens
attctgcagcacaaagtctcccttct

SEQ ID NO: 121649 - DNA, 26 bp, Homo sapiens
ttctgcagcacaaagtctcccttctt

SEQ ID NO: 121650 - DNA, 26 bp, Homo sapiens
tctgcagcacaaagtctcccttcttt

SEQ ID NO: 121651 - DNA, 26 bp, Homo sapiens
ctgcagcacaaagtctcccttctttt

SEQ ID NO: 121652 - DNA, 26 bp, Homo sapiens
tgcagcacaaagtctcccttcttttt

SEQ ID NO: 121653 - DNA, 26 bp, Homo sapiens
gcagcacaaagtctcccttctttttc

SEQ ID NO: 121654 - DNA, 26 bp, Homo sapiens
cagcacaaagtctcccttctttttct

SEQ ID NO: 121655 - DNA, 26 bp, Homo sapiens
agcacaaagtctcccttctttttctc

SEQ ID NO: 121656 - DNA, 26 bp, Homo sapiens
gcacaaagtctcccttctttttctct

SEQ ID NO: 121657 - DNA, 26 bp, Homo sapiens
cacaaagtctcccttctttttctcta

SEQ ID NO: 121658 - DNA, 26 bp, Homo sapiens
acaaagtctcccttctttttctctat

SEQ ID NO: 121659 - DNA, 26 bp, Homo sapiens
caaagtctcccttctttttctctatg

SEQ ID NO: 121660 - DNA, 26 bp, Homo sapiens
aaagtctcccttctttttctctatgg

SEQ ID NO: 121661 - DNA, 26 bp, Homo sapiens
aagtctcccttctttttctctatggt

SEQ ID NO: 121662 - DNA, 26 bp, Homo sapiens
agtctcccttctttttctctatggtg

SEQ ID NO: 121663 - DNA, 26 bp, Homo sapiens
gtctcccttctttttctctatggtgt

SEQ ID NO: 121664 - DNA, 26 bp, Homo sapiens
tctcccttctttttctctatggtgtc

SEQ ID NO: 121665 - DNA, 26 bp, Homo sapiens
ctcccttctttttctctatggtgtcc

SEQ ID NO: 121666 - DNA, 26 bp, Homo sapiens
tcccttctttttctctatggtgtcca

SEQ ID NO: 121667 - DNA, 26 bp, Homo sapiens
cccttctttttctctatggtgtccac

SEQ ID NO: 121668 - DNA, 26 bp, Homo sapiens
ccttctttttctctatggtgtccaca

SEQ ID NO: 121669 - DNA, 26 bp, Homo sapiens
cttctttttctctatggtgtccacaa

SEQ ID NO: 121670 - DNA, 26 bp, Homo sapiens
ttctttttctctatggtgtccacaag

SEQ ID NO: 121671 - DNA, 26 bp, Homo sapiens
tctttttctctatggtgtccacaagc

SEQ ID NO: 121672 - DNA, 26 bp, Homo sapiens
ctttttctctatggtgtccacaagct

SEQ ID NO: 121673 - DNA, 26 bp, Homo sapiens
tttttctctatggtgtccacaagctt

SEQ ID NO: 121674 - DNA, 26 bp, Homo sapiens
ttttctctatggtgtccacaagcttc

SEQ ID NO: 121675 - DNA, 26 bp, Homo sapiens
tttctctatggtgtccacaagcttct

SEQ ID NO: 121676 - DNA, 26 bp, Homo sapiens
ttctctatggtgtccacaagcttctt

SEQ ID NO: 121677 - DNA, 26 bp, Homo sapiens
tctctatggtgtccacaagcttcttc

SEQ ID NO: 121678 - DNA, 26 bp, Homo sapiens
ctctatggtgtccacaagcttcttct

SEQ ID NO: 121679 - DNA, 26 bp, Homo sapiens
tctatggtgtccacaagcttcttctg

SEQ ID NO: 121680 - DNA, 26 bp, Homo sapiens
ctatggtgtccacaagcttcttctgg

SEQ ID NO: 121681 - DNA, 26 bp, Homo sapiens
tatggtgtccacaagcttcttctgga

SEQ ID NO: 121682 - DNA, 26 bp, Homo sapiens
atggtgtccacaagcttcttctggaa

SEQ ID NO: 121683 - DNA, 26 bp, Homo sapiens
tggtgtccacaagcttcttctggaat

SEQ ID NO: 121684 - DNA, 26 bp, Homo sapiens
ggtgtccacaagcttcttctggaatt

SEQ ID NO: 121685 - DNA, 26 bp, Homo sapiens
gtgtccacaagcttcttctggaattc

SEQ ID NO: 121686 - DNA, 26 bp, Homo sapiens
tgtccacaagcttcttctggaattca

SEQ ID NO: 121687 - DNA, 26 bp, Homo sapiens
gtccacaagcttcttctggaattcat

SEQ ID NO: 121688 - DNA, 26 bp, Homo sapiens
tccacaagcttcttctggaattcatg

SEQ ID NO: 121689 - DNA, 26 bp, Homo sapiens
ccacaagcttcttctggaattcatgg

SEQ ID NO: 121690 - DNA, 26 bp, Homo sapiens
cacaagcttcttctggaattcatggt

SEQ ID NO: 121691 - DNA, 26 bp, Homo sapiens
acaagcttcttctggaattcatggtt

SEQ ID NO: 121692 - DNA, 26 bp, Homo sapiens
caagcttcttctggaattcatggttt

SEQ ID NO: 121693 - DNA, 26 bp, Homo sapiens
aagcttcttctggaattcatggtttt

SEQ ID NO: 121694 - DNA, 26 bp, Homo sapiens
agcttcttctggaattcatggttttc

SEQ ID NO: 121695 - DNA, 26 bp, Homo sapiens
gcttcttctggaattcatggttttca

SEQ ID NO: 121696 - DNA, 26 bp, Homo sapiens
cttcttctggaattcatggttttcat

SEQ ID NO: 121697 - DNA, 26 bp, Homo sapiens
ttcttctggaattcatggttttcatc

SEQ ID NO: 121698 - DNA, 26 bp, Homo sapiens
tcttctggaattcatggttttcatcc

SEQ ID NO: 121699 - DNA, 26 bp, Homo sapiens
cttctggaattcatggttttcatcct

SEQ ID NO: 121700 - DNA, 26 bp, Homo sapiens
ttctggaattcatggttttcatcctt

SEQ ID NO: 121701 - DNA, 26 bp, Homo sapiens
tctggaattcatggttttcatccttg

SEQ ID NO: 121702 - DNA, 26 bp, Homo sapiens
ctggaattcatggttttcatccttga

SEQ ID NO: 121703 - DNA, 26 bp, Homo sapiens
tggaattcatggttttcatccttgaa

SEQ ID NO: 121704 - DNA, 26 bp, Homo sapiens
ggaattcatggttttcatccttgaag

SEQ ID NO: 121705 - DNA, 26 bp, Homo sapiens
gaattcatggttttcatccttgaagg

SEQ ID NO: 121706 - DNA, 26 bp, Homo sapiens
aattcatggttttcatccttgaagga

SEQ ID NO: 121707 - DNA, 26 bp, Homo sapiens
attcatggttttcatccttgaaggag

SEQ ID NO: 121708 - DNA, 26 bp, Homo sapiens
ttcatggttttcatccttgaaggagt

SEQ ID NO: 121709 - DNA, 26 bp, Homo sapiens
tcatggttttcatccttgaaggagtg

SEQ ID NO: 121710 - DNA, 26 bp, Homo sapiens
catggttttcatccttgaaggagtgc

SEQ ID NO: 121711 - DNA, 26 bp, Homo sapiens
atggttttcatccttgaaggagtgct

SEQ ID NO: 121712 - DNA, 26 bp, Homo sapiens
tggttttcatccttgaaggagtgctc

SEQ ID NO: 121713 - DNA, 26 bp, Homo sapiens
ggttttcatccttgaaggagtgctcc

SEQ ID NO: 121714 - DNA, 26 bp, Homo sapiens
gttttcatccttgaaggagtgctcca

SEQ ID NO: 121715 - DNA, 26 bp, Homo sapiens
ttttcatccttgaaggagtgctccat

SEQ ID NO: 121716 - DNA, 26 bp, Homo sapiens
tttcatccttgaaggagtgctccatg

SEQ ID NO: 121717 - DNA, 26 bp, Homo sapiens
ttcatccttgaaggagtgctccatga

SEQ ID NO: 121718 - DNA, 26 bp, Homo sapiens
tcatccttgaaggagtgctccatgaa

SEQ ID NO: 121719 - DNA, 26 bp, Homo sapiens
catccttgaaggagtgctccatgaag

SEQ ID NO: 121720 - DNA, 26 bp, Homo sapiens
atccttgaaggagtgctccatgaaga

SEQ ID NO: 121721 - DNA, 26 bp, Homo sapiens
tccttgaaggagtgctccatgaagac

SEQ ID NO: 121722 - DNA, 26 bp, Homo sapiens
ccttgaaggagtgctccatgaagact

SEQ ID NO: 121723 - DNA, 26 bp, Homo sapiens
cttgaaggagtgctccatgaagactg

SEQ ID NO: 121724 - DNA, 26 bp, Homo sapiens
ttgaaggagtgctccatgaagactgc

SEQ ID NO: 121725 - DNA, 26 bp, Homo sapiens
tgaaggagtgctccatgaagactgca

SEQ ID NO: 121726 - DNA, 26 bp, Homo sapiens
gaaggagtgctccatgaagactgcaa

SEQ ID NO: 121727 - DNA, 26 bp, Homo sapiens
aaggagtgctccatgaagactgcaat

SEQ ID NO: 121728 - DNA, 26 bp, Homo sapiens
aggagtgctccatgaagactgcaatg

SEQ ID NO: 121729 - DNA, 26 bp, Homo sapiens
ggagtgctccatgaagactgcaatgg

SEQ ID NO: 121730 - DNA, 26 bp, Homo sapiens
gagtgctccatgaagactgcaatggc

SEQ ID NO: 121731 - DNA, 26 bp, Homo sapiens
agtgctccatgaagactgcaatggct

SEQ ID NO: 121732 - DNA, 26 bp, Homo sapiens
gtgctccatgaagactgcaatggctt

SEQ ID NO: 121733 - DNA, 26 bp, Homo sapiens
tgctccatgaagactgcaatggcttc

SEQ ID NO: 121734 - DNA, 26 bp, Homo sapiens
gctccatgaagactgcaatggcttcc

SEQ ID NO: 121735 - DNA, 26 bp, Homo sapiens
ctccatgaagactgcaatggcttccc

SEQ ID NO: 121736 - DNA, 26 bp, Homo sapiens
tccatgaagactgcaatggcttccct

SEQ ID NO: 121737 - DNA, 26 bp, Homo sapiens
ccatgaagactgcaatggcttccctc

SEQ ID NO: 121738 - DNA, 26 bp, Homo sapiens
catgaagactgcaatggcttccctct

SEQ ID NO: 121739 - DNA, 26 bp, Homo sapiens
atgaagactgcaatggcttccctctc

SEQ ID NO: 121740 - DNA, 26 bp, Homo sapiens
tgaagactgcaatggcttccctctca

SEQ ID NO: 121741 - DNA, 26 bp, Homo sapiens
gaagactgcaatggcttccctctcac

SEQ ID NO: 121742 - DNA, 26 bp, Homo sapiens
aagactgcaatggcttccctctcaca

SEQ ID NO: 121743 - DNA, 26 bp, Homo sapiens
agactgcaatggcttccctctcacag

SEQ ID NO: 121744 - DNA, 26 bp, Homo sapiens
gactgcaatggcttccctctcacagg

SEQ ID NO: 121745 - DNA, 26 bp, Homo sapiens
actgcaatggcttccctctcacaggc

SEQ ID NO: 121746 - DNA, 26 bp, Homo sapiens
ctgcaatggcttccctctcacaggct

SEQ ID NO: 121747 - DNA, 26 bp, Homo sapiens
tgcaatggcttccctctcacaggctg

SEQ ID NO: 121748 - DNA, 26 bp, Homo sapiens
gcaatggcttccctctcacaggctgc

SEQ ID NO: 121749 - DNA, 26 bp, Homo sapiens
caatggcttccctctcacaggctgca

SEQ ID NO: 121750 - DNA, 26 bp, Homo sapiens
aatggcttccctctcacaggctgcat

SEQ ID NO: 121751 - DNA, 26 bp, Homo sapiens
atggcttccctctcacaggctgcatg

SEQ ID NO: 121752 - DNA, 26 bp, Homo sapiens
tggcttccctctcacaggctgcatgc

SEQ ID NO: 121753 - DNA, 26 bp, Homo sapiens
ggcttccctctcacaggctgcatgca

SEQ ID NO: 121754 - DNA, 26 bp, Homo sapiens
gcttccctctcacaggctgcatgcac

SEQ ID NO: 121755 - DNA, 26 bp, Homo sapiens
cttccctctcacaggctgcatgcacg

SEQ ID NO: 121756 - DNA, 26 bp, Homo sapiens
ttccctctcacaggctgcatgcacgt

SEQ ID NO: 121757 - DNA, 26 bp, Homo sapiens
tccctctcacaggctgcatgcacgtc

SEQ ID NO: 121758 - DNA, 26 bp, Homo sapiens
ccctctcacaggctgcatgcacgtcc

SEQ ID NO: 121759 - DNA, 26 bp, Homo sapiens
cctctcacaggctgcatgcacgtcca

SEQ ID NO: 121760 - DNA, 26 bp, Homo sapiens
ctctcacaggctgcatgcacgtccag

SEQ ID NO: 121761 - DNA, 26 bp, Homo sapiens
tctcacaggctgcatgcacgtccagc

SEQ ID NO: 121762 - DNA, 26 bp, Homo sapiens
ctcacaggctgcatgcacgtccagca

SEQ ID NO: 121763 - DNA, 26 bp, Homo sapiens
tcacaggctgcatgcacgtccagcag

SEQ ID NO: 121764 - DNA, 26 bp, Homo sapiens
cacaggctgcatgcacgtccagcagc

SEQ ID NO: 121765 - DNA, 26 bp, Homo sapiens
acaggctgcatgcacgtccagcagct

SEQ ID NO: 121766 - DNA, 26 bp, Homo sapiens
caggctgcatgcacgtccagcagctc

SEQ ID NO: 121767 - DNA, 26 bp, Homo sapiens
aggctgcatgcacgtccagcagctcc

SEQ ID NO: 121768 - DNA, 26 bp, Homo sapiens
ggctgcatgcacgtccagcagctcct

SEQ ID NO: 121769 - DNA, 26 bp, Homo sapiens
gctgcatgcacgtccagcagctcctg

SEQ ID NO: 121770 - DNA, 26 bp, Homo sapiens
ctgcatgcacgtccagcagctcctgg

SEQ ID NO: 121771 - DNA, 26 bp, Homo sapiens
tgcatgcacgtccagcagctcctgga

SEQ ID NO: 121772 - DNA, 26 bp, Homo sapiens
gcatgcacgtccagcagctcctggag

SEQ ID NO: 121773 - DNA, 26 bp, Homo sapiens
catgcacgtccagcagctcctggagc

SEQ ID NO: 121774 - DNA, 26 bp, Homo sapiens
atgcacgtccagcagctcctggagcg

SEQ ID NO: 121775 - DNA, 26 bp, Homo sapiens
tgcacgtccagcagctcctggagcgt

SEQ ID NO: 121776 - DNA, 26 bp, Homo sapiens
gcacgtccagcagctcctggagcgtg

SEQ ID NO: 121777 - DNA, 26 bp, Homo sapiens
cacgtccagcagctcctggagcgtgt

SEQ ID NO: 121778 - DNA, 26 bp, Homo sapiens
acgtccagcagctcctggagcgtgtc

SEQ ID NO: 121779 - DNA, 26 bp, Homo sapiens
cgtccagcagctcctggagcgtgtct

SEQ ID NO: 121780 - DNA, 26 bp, Homo sapiens
gtccagcagctcctggagcgtgtctg

SEQ ID NO: 121781 - DNA, 26 bp, Homo sapiens
tccagcagctcctggagcgtgtctgt

SEQ ID NO: 121782 - DNA, 26 bp, Homo sapiens
ccagcagctcctggagcgtgtctgtg

SEQ ID NO: 121783 - DNA, 26 bp, Homo sapiens
cagcagctcctggagcgtgtctgtgg

SEQ ID NO: 121784 - DNA, 26 bp, Homo sapiens
agcagctcctggagcgtgtctgtggg

SEQ ID NO: 121785 - DNA, 26 bp, Homo sapiens
gcagctcctggagcgtgtctgtgggg

SEQ ID NO: 121786 - DNA, 26 bp, Homo sapiens
cagctcctggagcgtgtctgtgggga

SEQ ID NO: 121787 - DNA, 26 bp, Homo sapiens
agctcctggagcgtgtctgtggggag

SEQ ID NO: 121788 - DNA, 26 bp, Homo sapiens
gctcctggagcgtgtctgtggggagc

SEQ ID NO: 121789 - DNA, 26 bp, Homo sapiens
ctcctggagcgtgtctgtggggagcc

SEQ ID NO: 121790 - DNA, 26 bp, Homo sapiens
tcctggagcgtgtctgtggggagcct

SEQ ID NO: 121791 - DNA, 26 bp, Homo sapiens
cctggagcgtgtctgtggggagcctc

SEQ ID NO: 121792 - DNA, 26 bp, Homo sapiens
ctggagcgtgtctgtggggagcctca

SEQ ID NO: 121793 - DNA, 26 bp, Homo sapiens
tggagcgtgtctgtggggagcctcag

SEQ ID NO: 121794 - DNA, 26 bp, Homo sapiens
ggagcgtgtctgtggggagcctcagt

SEQ ID NO: 121795 - DNA, 26 bp, Homo sapiens
gagcgtgtctgtggggagcctcagtt

SEQ ID NO: 121796 - DNA, 26 bp, Homo sapiens
agcgtgtctgtggggagcctcagttg

SEQ ID NO: 121797 - DNA, 26 bp, Homo sapiens
gcgtgtctgtggggagcctcagttgc

SEQ ID NO: 121798 - DNA, 26 bp, Homo sapiens
cgtgtctgtggggagcctcagttgct

SEQ ID NO: 121799 - DNA, 26 bp, Homo sapiens
gtgtctgtggggagcctcagttgctg

SEQ ID NO: 121800 - DNA, 26 bp, Homo sapiens
tgtctgtggggagcctcagttgctgg

SEQ ID NO: 121801 - DNA, 26 bp, Homo sapiens
gtctgtggggagcctcagttgctggg

SEQ ID NO: 121802 - DNA, 26 bp, Homo sapiens
tctgtggggagcctcagttgctgggc

SEQ ID NO: 121803 - DNA, 26 bp, Homo sapiens
ctgtggggagcctcagttgctgggcc

SEQ ID NO: 121804 - DNA, 26 bp, Homo sapiens
tgtggggagcctcagttgctgggcca

SEQ ID NO: 121805 - DNA, 26 bp, Homo sapiens
gtggggagcctcagttgctgggccat

SEQ ID NO: 121806 - DNA, 26 bp, Homo sapiens
tggggagcctcagttgctgggccatc

SEQ ID NO: 121807 - DNA, 26 bp, Homo sapiens
ggggagcctcagttgctgggccatct

SEQ ID NO: 121808 - DNA, 26 bp, Homo sapiens
gggagcctcagttgctgggccatctg

SEQ ID NO: 121809 - DNA, 26 bp, Homo sapiens
ggagcctcagttgctgggccatctgc

SEQ ID NO: 121810 - DNA, 26 bp, Homo sapiens
gagcctcagttgctgggccatctgct

SEQ ID NO: 121811 - DNA, 26 bp, Homo sapiens
agcctcagttgctgggccatctgctg

SEQ ID NO: 121812 - DNA, 26 bp, Homo sapiens
gcctcagttgctgggccatctgctgg

SEQ ID NO: 121813 - DNA, 26 bp, Homo sapiens
cctcagttgctgggccatctgctggc

SEQ ID NO: 121814 - DNA, 26 bp, Homo sapiens
ctcagttgctgggccatctgctggct

SEQ ID NO: 121815 - DNA, 26 bp, Homo sapiens
tcagttgctgggccatctgctggcta

SEQ ID NO: 121816 - DNA, 26 bp, Homo sapiens
cagttgctgggccatctgctggctat

SEQ ID NO: 121817 - DNA, 26 bp, Homo sapiens
agttgctgggccatctgctggctata

SEQ ID NO: 121818 - DNA, 26 bp, Homo sapiens
gttgctgggccatctgctggctatag

SEQ ID NO: 121819 - DNA, 26 bp, Homo sapiens
ttgctgggccatctgctggctatagt

SEQ ID NO: 121820 - DNA, 26 bp, Homo sapiens
tgctgggccatctgctggctatagtg

SEQ ID NO: 121821 - DNA, 26 bp, Homo sapiens
gctgggccatctgctggctatagtgg

SEQ ID NO: 121822 - DNA, 26 bp, Homo sapiens
ctgggccatctgctggctatagtggt

SEQ ID NO: 121823 - DNA, 26 bp, Homo sapiens
tgggccatctgctggctatagtggtc

SEQ ID NO: 121824 - DNA, 26 bp, Homo sapiens
gggccatctgctggctatagtggtcg

SEQ ID NO: 121825 - DNA, 26 bp, Homo sapiens
ggccatctgctggctatagtggtcgg

SEQ ID NO: 121826 - DNA, 26 bp, Homo sapiens
gccatctgctggctatagtggtcggc

SEQ ID NO: 121827 - DNA, 26 bp, Homo sapiens
ccatctgctggctatagtggtcggct

SEQ ID NO: 121828 - DNA, 26 bp, Homo sapiens
catctgctggctatagtggtcggctg

SEQ ID NO: 121829 - DNA, 26 bp, Homo sapiens
atctgctggctatagtggtcggctgc

SEQ ID NO: 121830 - DNA, 26 bp, Homo sapiens
tctgctggctatagtggtcggctgcc

SEQ ID NO: 121831 - DNA, 26 bp, Homo sapiens
ctgctggctatagtggtcggctgccc

SEQ ID NO: 121832 - DNA, 26 bp, Homo sapiens
tgctggctatagtggtcggctgccct

SEQ ID NO: 121833 - DNA, 26 bp, Homo sapiens
gctggctatagtggtcggctgccctc

SEQ ID NO: 121834 - DNA, 26 bp, Homo sapiens
ctggctatagtggtcggctgccctct

SEQ ID NO: 121835 - DNA, 26 bp, Homo sapiens
tggctatagtggtcggctgccctctg

SEQ ID NO: 121836 - DNA, 26 bp, Homo sapiens
ggctatagtggtcggctgccctctgc

SEQ ID NO: 121837 - DNA, 26 bp, Homo sapiens
gctatagtggtcggctgccctctgca

SEQ ID NO: 121838 - DNA, 26 bp, Homo sapiens
ctatagtggtcggctgccctctgcac

SEQ ID NO: 121839 - DNA, 26 bp, Homo sapiens
tatagtggtcggctgccctctgcaca

SEQ ID NO: 121840 - DNA, 26 bp, Homo sapiens
atagtggtcggctgccctctgcacag

SEQ ID NO: 121841 - DNA, 26 bp, Homo sapiens
tagtggtcggctgccctctgcacagc

SEQ ID NO: 121842 - DNA, 26 bp, Homo sapiens
agtggtcggctgccctctgcacagcc

SEQ ID NO: 121843 - DNA, 26 bp, Homo sapiens
gtggtcggctgccctctgcacagccg

SEQ ID NO: 121844 - DNA, 26 bp, Homo sapiens
tggtcggctgccctctgcacagccgc

SEQ ID NO: 121845 - DNA, 26 bp, Homo sapiens
ggtcggctgccctctgcacagccgct

SEQ ID NO: 121846 - DNA, 26 bp, Homo sapiens
gtcggctgccctctgcacagccgctg

SEQ ID NO: 121847 - DNA, 26 bp, Homo sapiens
tcggctgccctctgcacagccgctgg

SEQ ID NO: 121848 - DNA, 26 bp, Homo sapiens
cggctgccctctgcacagccgctggg

SEQ ID NO: 121849 - DNA, 26 bp, Homo sapiens
ggctgccctctgcacagccgctgggt

SEQ ID NO: 121850 - DNA, 26 bp, Homo sapiens
gctgccctctgcacagccgctgggtt

SEQ ID NO: 121851 - DNA, 26 bp, Homo sapiens
ctgccctctgcacagccgctgggttc

SEQ ID NO: 121852 - DNA, 26 bp, Homo sapiens
tgccctctgcacagccgctgggttct

SEQ ID NO: 121853 - DNA, 26 bp, Homo sapiens
gccctctgcacagccgctgggttctc

SEQ ID NO: 121854 - DNA, 26 bp, Homo sapiens
ccctctgcacagccgctgggttctca

SEQ ID NO: 121855 - DNA, 26 bp, Homo sapiens
cctctgcacagccgctgggttctcaa

SEQ ID NO: 121856 - DNA, 26 bp, Homo sapiens
ctctgcacagccgctgggttctcaag

SEQ ID NO: 121857 - DNA, 26 bp, Homo sapiens
tctgcacagccgctgggttctcaagc

SEQ ID NO: 121858 - DNA, 26 bp, Homo sapiens
ctgcacagccgctgggttctcaagct

SEQ ID NO: 121859 - DNA, 26 bp, Homo sapiens
tgcacagccgctgggttctcaagctg

SEQ ID NO: 121860 - DNA, 26 bp, Homo sapiens
gcacagccgctgggttctcaagctgg

SEQ ID NO: 121861 - DNA, 26 bp, Homo sapiens
cacagccgctgggttctcaagctggg

SEQ ID NO: 121862 - DNA, 26 bp, Homo sapiens
acagccgctgggttctcaagctgggc

SEQ ID NO: 121863 - DNA, 26 bp, Homo sapiens
cagccgctgggttctcaagctgggcc

SEQ ID NO: 121864 - DNA, 26 bp, Homo sapiens
agccgctgggttctcaagctgggcca

SEQ ID NO: 121865 - DNA, 26 bp, Homo sapiens
gccgctgggttctcaagctgggccag

SEQ ID NO: 121866 - DNA, 26 bp, Homo sapiens
ccgctgggttctcaagctgggccagt

SEQ ID NO: 121867 - DNA, 26 bp, Homo sapiens
cgctgggttctcaagctgggccagtg

SEQ ID NO: 121868 - DNA, 26 bp, Homo sapiens
gctgggttctcaagctgggccagtgc

SEQ ID NO: 121869 - DNA, 26 bp, Homo sapiens
ctgggttctcaagctgggccagtgct

SEQ ID NO: 121870 - DNA, 26 bp, Homo sapiens
tgggttctcaagctgggccagtgctg

SEQ ID NO: 121871 - DNA, 26 bp, Homo sapiens
gggttctcaagctgggccagtgctgt

SEQ ID NO: 121872 - DNA, 26 bp, Homo sapiens
ggttctcaagctgggccagtgctgtc

SEQ ID NO: 121873 - DNA, 26 bp, Homo sapiens
gttctcaagctgggccagtgctgtca

SEQ ID NO: 121874 - DNA, 26 bp, Homo sapiens
ttctcaagctgggccagtgctgtcac

SEQ ID NO: 121875 - DNA, 26 bp, Homo sapiens
tctcaagctgggccagtgctgtcact

SEQ ID NO: 121876 - DNA, 26 bp, Homo sapiens
ctcaagctgggccagtgctgtcactg

SEQ ID NO: 121877 - DNA, 26 bp, Homo sapiens
tcaagctgggccagtgctgtcactgc

SEQ ID NO: 121878 - DNA, 26 bp, Homo sapiens
caagctgggccagtgctgtcactgca

SEQ ID NO: 121879 - DNA, 26 bp, Homo sapiens
aagctgggccagtgctgtcactgcat

SEQ ID NO: 121880 - DNA, 26 bp, Homo sapiens
agctgggccagtgctgtcactgcatt

SEQ ID NO: 121881 - DNA, 26 bp, Homo sapiens
gctgggccagtgctgtcactgcattc

SEQ ID NO: 121882 - DNA, 26 bp, Homo sapiens
ctgggccagtgctgtcactgcattct

SEQ ID NO: 121883 - DNA, 26 bp, Homo sapiens
tgggccagtgctgtcactgcattctc

SEQ ID NO: 121884 - DNA, 26 bp, Homo sapiens
gggccagtgctgtcactgcattctcc

SEQ ID NO: 121885 - DNA, 26 bp, Homo sapiens
ggccagtgctgtcactgcattctcca

SEQ ID NO: 121886 - DNA, 26 bp, Homo sapiens
gccagtgctgtcactgcattctccag

SEQ ID NO: 121887 - DNA, 26 bp, Homo sapiens
ccagtgctgtcactgcattctccaga

SEQ ID NO: 121888 - DNA, 26 bp, Homo sapiens
cagtgctgtcactgcattctccagac

SEQ ID NO: 121889 - DNA, 26 bp, Homo sapiens
agtgctgtcactgcattctccagaca

SEQ ID NO: 121890 - DNA, 26 bp, Homo sapiens
gtgctgtcactgcattctccagacaa

SEQ ID NO: 121891 - DNA, 26 bp, Homo sapiens
tgctgtcactgcattctccagacaag

SEQ ID NO: 121892 - DNA, 26 bp, Homo sapiens
gctgtcactgcattctccagacaagg

SEQ ID NO: 121893 - DNA, 26 bp, Homo sapiens
ctgtcactgcattctccagacaaggt

SEQ ID NO: 121894 - DNA, 26 bp, Homo sapiens
tgtcactgcattctccagacaaggta

SEQ ID NO: 121895 - DNA, 26 bp, Homo sapiens
gtcactgcattctccagacaaggtac

SEQ ID NO: 121896 - DNA, 26 bp, Homo sapiens
tcactgcattctccagacaaggtact

SEQ ID NO: 121897 - DNA, 26 bp, Homo sapiens
cactgcattctccagacaaggtactg

SEQ ID NO: 121898 - DNA, 26 bp, Homo sapiens
actgcattctccagacaaggtactgc

SEQ ID NO: 121899 - DNA, 26 bp, Homo sapiens
ctgcattctccagacaaggtactgct

SEQ ID NO: 121900 - DNA, 26 bp, Homo sapiens
tgcattctccagacaaggtactgctc

SEQ ID NO: 121901 - DNA, 26 bp, Homo sapiens
gcattctccagacaaggtactgctcc

SEQ ID NO: 121902 - DNA, 26 bp, Homo sapiens
cattctccagacaaggtactgctcca

SEQ ID NO: 121903 - DNA, 26 bp, Homo sapiens
attctccagacaaggtactgctccac

SEQ ID NO: 121904 - DNA, 26 bp, Homo sapiens
ttctccagacaaggtactgctccact

SEQ ID NO: 121905 - DNA, 26 bp, Homo sapiens
tctccagacaaggtactgctccactg

SEQ ID NO: 121906 - DNA, 26 bp, Homo sapiens
ctccagacaaggtactgctccactgt

SEQ ID NO: 121907 - DNA, 26 bp, Homo sapiens
tccagacaaggtactgctccactgtt

SEQ ID NO: 121908 - DNA, 26 bp, Homo sapiens
ccagacaaggtactgctccactgttg

SEQ ID NO: 121909 - DNA, 26 bp, Homo sapiens
cagacaaggtactgctccactgttga

SEQ ID NO: 121910 - DNA, 26 bp, Homo sapiens
agacaaggtactgctccactgttgat

SEQ ID NO: 121911 - DNA, 26 bp, Homo sapiens
gacaaggtactgctccactgttgatg

SEQ ID NO: 121912 - DNA, 26 bp, Homo sapiens
acaaggtactgctccactgttgatgg

SEQ ID NO: 121913 - DNA, 26 bp, Homo sapiens
caaggtactgctccactgttgatggc

SEQ ID NO: 121914 - DNA, 26 bp, Homo sapiens
aaggtactgctccactgttgatggca

SEQ ID NO: 121915 - DNA, 26 bp, Homo sapiens
aggtactgctccactgttgatggcat

SEQ ID NO: 121916 - DNA, 26 bp, Homo sapiens
ggtactgctccactgttgatggcatc

SEQ ID NO: 121917 - DNA, 26 bp, Homo sapiens
gtactgctccactgttgatggcatct

SEQ ID NO: 121918 - DNA, 26 bp, Homo sapiens
tactgctccactgttgatggcatcta

SEQ ID NO: 121919 - DNA, 26 bp, Homo sapiens
actgctccactgttgatggcatctac

SEQ ID NO: 121920 - DNA, 26 bp, Homo sapiens
ctgctccactgttgatggcatctaca

SEQ ID NO: 121921 - DNA, 26 bp, Homo sapiens
tgctccactgttgatggcatctacat

SEQ ID NO: 121922 - DNA, 26 bp, Homo sapiens
gctccactgttgatggcatctacata

SEQ ID NO: 121923 - DNA, 26 bp, Homo sapiens
ctccactgttgatggcatctacataa

SEQ ID NO: 121924 - DNA, 26 bp, Homo sapiens
tccactgttgatggcatctacataag

SEQ ID NO: 121925 - DNA, 26 bp, Homo sapiens
ccactgttgatggcatctacataagt

SEQ ID NO: 121926 - DNA, 26 bp, Homo sapiens
cactgttgatggcatctacataagtc

SEQ ID NO: 121927 - DNA, 26 bp, Homo sapiens
actgttgatggcatctacataagtca

SEQ ID NO: 121928 - DNA, 26 bp, Homo sapiens
ctgttgatggcatctacataagtcac

SEQ ID NO: 121929 - DNA, 26 bp, Homo sapiens
tgttgatggcatctacataagtcacc

SEQ ID NO: 121930 - DNA, 26 bp, Homo sapiens
gttgatggcatctacataagtcacca

SEQ ID NO: 121931 - DNA, 26 bp, Homo sapiens
ttgatggcatctacataagtcaccac

SEQ ID NO: 121932 - DNA, 26 bp, Homo sapiens
tgatggcatctacataagtcaccacc

SEQ ID NO: 121933 - DNA, 26 bp, Homo sapiens
gatggcatctacataagtcaccacca

SEQ ID NO: 121934 - DNA, 26 bp, Homo sapiens
atggcatctacataagtcaccaccag

SEQ ID NO: 121935 - DNA, 26 bp, Homo sapiens
tggcatctacataagtcaccaccaga

SEQ ID NO: 121936 - DNA, 26 bp, Homo sapiens
ggcatctacataagtcaccaccagag

SEQ ID NO: 121937 - DNA, 26 bp, Homo sapiens
gcatctacataagtcaccaccagagt

SEQ ID NO: 121938 - DNA, 26 bp, Homo sapiens
catctacataagtcaccaccagagtc

SEQ ID NO: 121939 - DNA, 26 bp, Homo sapiens
atctacataagtcaccaccagagtcc

SEQ ID NO: 121940 - DNA, 26 bp, Homo sapiens
tctacataagtcaccaccagagtccc

SEQ ID NO: 121941 - DNA, 26 bp, Homo sapiens
ctacataagtcaccaccagagtcccc

SEQ ID NO: 121942 - DNA, 26 bp, Homo sapiens
tacataagtcaccaccagagtcccca

SEQ ID NO: 121943 - DNA, 26 bp, Homo sapiens
acataagtcaccaccagagtccccag

SEQ ID NO: 121944 - DNA, 26 bp, Homo sapiens
cataagtcaccaccagagtccccagc

SEQ ID NO: 121945 - DNA, 26 bp, Homo sapiens
ataagtcaccaccagagtccccagcc

SEQ ID NO: 121946 - DNA, 26 bp, Homo sapiens
taagtcaccaccagagtccccagccg

SEQ ID NO: 121947 - DNA, 26 bp, Homo sapiens
aagtcaccaccagagtccccagccgc

SEQ ID NO: 121948 - DNA, 26 bp, Homo sapiens
agtcaccaccagagtccccagccgct

SEQ ID NO: 121949 - DNA, 26 bp, Homo sapiens
gtcaccaccagagtccccagccgctt

SEQ ID NO: 121950 - DNA, 26 bp, Homo sapiens
tcaccaccagagtccccagccgcttt

SEQ ID NO: 121951 - DNA, 26 bp, Homo sapiens
caccaccagagtccccagccgctttc

SEQ ID NO: 121952 - DNA, 26 bp, Homo sapiens
accaccagagtccccagccgctttcc

SEQ ID NO: 121953 - DNA, 26 bp, Homo sapiens
ccaccagagtccccagccgctttcca

SEQ ID NO: 121954 - DNA, 26 bp, Homo sapiens
caccagagtccccagccgctttccag

SEQ ID NO: 121955 - DNA, 26 bp, Homo sapiens
accagagtccccagccgctttccagt

SEQ ID NO: 121956 - DNA, 26 bp, Homo sapiens
ccagagtccccagccgctttccagtg

SEQ ID NO: 121957 - DNA, 26 bp, Homo sapiens
cagagtccccagccgctttccagtga

SEQ ID NO: 121958 - DNA, 26 bp, Homo sapiens
agagtccccagccgctttccagtgac

SEQ ID NO: 121959 - DNA, 26 bp, Homo sapiens
gagtccccagccgctttccagtgaca

SEQ ID NO: 121960 - DNA, 26 bp, Homo sapiens
agtccccagccgctttccagtgacaa

SEQ ID NO: 121961 - DNA, 26 bp, Homo sapiens
gtccccagccgctttccagtgacaat

SEQ ID NO: 121962 - DNA, 26 bp, Homo sapiens
tccccagccgctttccagtgacaatg

SEQ ID NO: 121963 - DNA, 26 bp, Homo sapiens
ccccagccgctttccagtgacaatga

SEQ ID NO: 121964 - DNA, 26 bp, Homo sapiens
cccagccgctttccagtgacaatgat

SEQ ID NO: 121965 - DNA, 26 bp, Homo sapiens
ccagccgctttccagtgacaatgatt

SEQ ID NO: 121966 - DNA, 26 bp, Homo sapiens
cagccgctttccagtgacaatgattc

SEQ ID NO: 121967 - DNA, 26 bp, Homo sapiens
agccgctttccagtgacaatgattcc

SEQ ID NO: 121968 - DNA, 26 bp, Homo sapiens
gccgctttccagtgacaatgattccc

SEQ ID NO: 121969 - DNA, 26 bp, Homo sapiens
ccgctttccagtgacaatgattccct

SEQ ID NO: 121970 - DNA, 26 bp, Homo sapiens
cgctttccagtgacaatgattccctc

SEQ ID NO: 121971 - DNA, 26 bp, Homo sapiens
gctttccagtgacaatgattccctct

SEQ ID NO: 121972 - DNA, 26 bp, Homo sapiens
ctttccagtgacaatgattccctctc

SEQ ID NO: 121973 - DNA, 26 bp, Homo sapiens
tttccagtgacaatgattccctctct

SEQ ID NO: 121974 - DNA, 26 bp, Homo sapiens
ttccagtgacaatgattccctctctc

SEQ ID NO: 121975 - DNA, 26 bp, Homo sapiens
tccagtgacaatgattccctctctca

SEQ ID NO: 121976 - DNA, 26 bp, Homo sapiens
ccagtgacaatgattccctctctcag

SEQ ID NO: 121977 - DNA, 26 bp, Homo sapiens
cagtgacaatgattccctctctcagg

SEQ ID NO: 121978 - DNA, 26 bp, Homo sapiens
agtgacaatgattccctctctcaggg

SEQ ID NO: 121979 - DNA, 26 bp, Homo sapiens
gtgacaatgattccctctctcagggt

SEQ ID NO: 121980 - DNA, 26 bp, Homo sapiens
tgacaatgattccctctctcagggtc

SEQ ID NO: 121981 - DNA, 26 bp, Homo sapiens
gacaatgattccctctctcagggtct

SEQ ID NO: 121982 - DNA, 26 bp, Homo sapiens
acaatgattccctctctcagggtctt

SEQ ID NO: 121983 - DNA, 26 bp, Homo sapiens
caatgattccctctctcagggtcttg

SEQ ID NO: 121984 - DNA, 26 bp, Homo sapiens
aatgattccctctctcagggtcttgg

SEQ ID NO: 121985 - DNA, 26 bp, Homo sapiens
atgattccctctctcagggtcttggt

SEQ ID NO: 121986 - DNA, 26 bp, Homo sapiens
tgattccctctctcagggtcttggtc

SEQ ID NO: 121987 - DNA, 26 bp, Homo sapiens
gattccctctctcagggtcttggtct

SEQ ID NO: 121988 - DNA, 26 bp, Homo sapiens
attccctctctcagggtcttggtctt

SEQ ID NO: 121989 - DNA, 26 bp, Homo sapiens
ttccctctctcagggtcttggtcttt

SEQ ID NO: 121990 - DNA, 26 bp, Homo sapiens
tccctctctcagggtcttggtctttg

SEQ ID NO: 121991 - DNA, 26 bp, Homo sapiens
ccctctctcagggtcttggtctttgc

SEQ ID NO: 121992 - DNA, 26 bp, Homo sapiens
cctctctcagggtcttggtctttgca

SEQ ID NO: 121993 - DNA, 26 bp, Homo sapiens
ctctctcagggtcttggtctttgcat

SEQ ID NO: 121994 - DNA, 26 bp, Homo sapiens
tctctcagggtcttggtctttgcatg

SEQ ID NO: 121995 - DNA, 26 bp, Homo sapiens
ctctcagggtcttggtctttgcatgg

SEQ ID NO: 121996 - DNA, 26 bp, Homo sapiens
tctcagggtcttggtctttgcatggg

SEQ ID NO: 121997 - DNA, 26 bp, Homo sapiens
ctcagggtcttggtctttgcatgggt

SEQ ID NO: 121998 - DNA, 26 bp, Homo sapiens
tcagggtcttggtctttgcatgggtg

SEQ ID NO: 121999 - DNA, 26 bp, Homo sapiens
cagggtcttggtctttgcatgggtga

SEQ ID NO: 122000 - DNA, 26 bp, Homo sapiens
agggtcttggtctttgcatgggtgaa

SEQ ID NO: 122001 - DNA, 26 bp, Homo sapiens
gggtcttggtctttgcatgggtgaag

SEQ ID NO: 122002 - DNA, 26 bp, Homo sapiens
ggtcttggtctttgcatgggtgaaga

SEQ ID NO: 122003 - DNA, 26 bp, Homo sapiens
gtcttggtctttgcatgggtgaagat

SEQ ID NO: 122004 - DNA, 26 bp, Homo sapiens
tcttggtctttgcatgggtgaagata

SEQ ID NO: 122005 - DNA, 26 bp, Homo sapiens
cttggtctttgcatgggtgaagatat

SEQ ID NO: 122006 - DNA, 26 bp, Homo sapiens
ttggtctttgcatgggtgaagatata

SEQ ID NO: 122007 - DNA, 26 bp, Homo sapiens
tggtctttgcatgggtgaagatataa

SEQ ID NO: 122008 - DNA, 26 bp, Homo sapiens
ggtctttgcatgggtgaagatataag

SEQ ID NO: 122009 - DNA, 26 bp, Homo sapiens
gtctttgcatgggtgaagatataaga

SEQ ID NO: 122010 - DNA, 26 bp, Homo sapiens
tctttgcatgggtgaagatataagaa

SEQ ID NO: 122011 - DNA, 26 bp, Homo sapiens
ctttgcatgggtgaagatataagaac

SEQ ID NO: 122012 - DNA, 26 bp, Homo sapiens
tttgcatgggtgaagatataagaaca

SEQ ID NO: 122013 - DNA, 26 bp, Homo sapiens
ttgcatgggtgaagatataagaacag

SEQ ID NO: 122014 - DNA, 26 bp, Homo sapiens
tgcatgggtgaagatataagaacaga

SEQ ID NO: 122015 - DNA, 26 bp, Homo sapiens
gcatgggtgaagatataagaacagaa

SEQ ID NO: 122016 - DNA, 26 bp, Homo sapiens
catgggtgaagatataagaacagaag

SEQ ID NO: 122017 - DNA, 26 bp, Homo sapiens
atgggtgaagatataagaacagaagt

SEQ ID NO: 122018 - DNA, 26 bp, Homo sapiens
tgggtgaagatataagaacagaagtt

SEQ ID NO: 122019 - DNA, 26 bp, Homo sapiens
gggtgaagatataagaacagaagttg

SEQ ID NO: 122020 - DNA, 26 bp, Homo sapiens
ggtgaagatataagaacagaagttgt

SEQ ID NO: 122021 - DNA, 26 bp, Homo sapiens
gtgaagatataagaacagaagttgtc

SEQ ID NO: 122022 - DNA, 26 bp, Homo sapiens
tgaagatataagaacagaagttgtct

SEQ ID NO: 122023 - DNA, 26 bp, Homo sapiens
gaagatataagaacagaagttgtctg

SEQ ID NO: 122024 - DNA, 26 bp, Homo sapiens
aagatataagaacagaagttgtctga

SEQ ID NO: 122025 - DNA, 26 bp, Homo sapiens
agatataagaacagaagttgtctgat

SEQ ID NO: 122026 - DNA, 26 bp, Homo sapiens
gatataagaacagaagttgtctgatt

SEQ ID NO: 122027 - DNA, 26 bp, Homo sapiens
atataagaacagaagttgtctgattg

SEQ ID NO: 122028 - DNA, 26 bp, Homo sapiens
tataagaacagaagttgtctgattgc

SEQ ID NO: 122029 - DNA, 26 bp, Homo sapiens
ataagaacagaagttgtctgattgca

SEQ ID NO: 122030 - DNA, 26 bp, Homo sapiens
taagaacagaagttgtctgattgcat

SEQ ID NO: 122031 - DNA, 26 bp, Homo sapiens
aagaacagaagttgtctgattgcata

SEQ ID NO: 122032 - DNA, 26 bp, Homo sapiens
agaacagaagttgtctgattgcataa

SEQ ID NO: 122033 - DNA, 26 bp, Homo sapiens
gaacagaagttgtctgattgcataag

SEQ ID NO: 122034 - DNA, 26 bp, Homo sapiens
aacagaagttgtctgattgcataagg

SEQ ID NO: 122035 - DNA, 26 bp, Homo sapiens
acagaagttgtctgattgcataagga

SEQ ID NO: 122036 - DNA, 26 bp, Homo sapiens
cagaagttgtctgattgcataaggaa

SEQ ID NO: 122037 - DNA, 26 bp, Homo sapiens
agaagttgtctgattgcataaggaaa

SEQ ID NO: 122038 - DNA, 26 bp, Homo sapiens
gaagttgtctgattgcataaggaaat

SEQ ID NO: 122039 - DNA, 26 bp, Homo sapiens
aagttgtctgattgcataaggaaatg

SEQ ID NO: 122040 - DNA, 26 bp, Homo sapiens
agttgtctgattgcataaggaaatgc

SEQ ID NO: 122041 - DNA, 26 bp, Homo sapiens
gttgtctgattgcataaggaaatgcc

SEQ ID NO: 122042 - DNA, 26 bp, Homo sapiens
ttgtctgattgcataaggaaatgcct

SEQ ID NO: 122043 - DNA, 26 bp, Homo sapiens
tgtctgattgcataaggaaatgcctt

SEQ ID NO: 122044 - DNA, 26 bp, Homo sapiens
gtctgattgcataaggaaatgccttt

SEQ ID NO: 122045 - DNA, 26 bp, Homo sapiens
tctgattgcataaggaaatgcctttc

SEQ ID NO: 122046 - DNA, 26 bp, Homo sapiens
ctgattgcataaggaaatgcctttcc

SEQ ID NO: 122047 - DNA, 26 bp, Homo sapiens
tgattgcataaggaaatgcctttcca

SEQ ID NO: 122048 - DNA, 26 bp, Homo sapiens
gattgcataaggaaatgcctttccag

SEQ ID NO: 122049 - DNA, 26 bp, Homo sapiens
attgcataaggaaatgcctttccaga

SEQ ID NO: 122050 - DNA, 26 bp, Homo sapiens
ttgcataaggaaatgcctttccagat

SEQ ID NO: 122051 - DNA, 26 bp, Homo sapiens
tgcataaggaaatgcctttccagatt

SEQ ID NO: 122052 - DNA, 26 bp, Homo sapiens
gcataaggaaatgcctttccagattt

SEQ ID NO: 122053 - DNA, 26 bp, Homo sapiens
cataaggaaatgcctttccagatttt

SEQ ID NO: 122054 - DNA, 26 bp, Homo sapiens
ataaggaaatgcctttccagattttc

SEQ ID NO: 122055 - DNA, 26 bp, Homo sapiens
taaggaaatgcctttccagattttct

SEQ ID NO: 122056 - DNA, 26 bp, Homo sapiens
aaggaaatgcctttccagattttctt

SEQ ID NO: 122057 - DNA, 26 bp, Homo sapiens
aggaaatgcctttccagattttcttc

SEQ ID NO: 122058 - DNA, 26 bp, Homo sapiens
ggaaatgcctttccagattttcttct

SEQ ID NO: 122059 - DNA, 26 bp, Homo sapiens
gaaatgcctttccagattttcttctg

SEQ ID NO: 122060 - DNA, 26 bp, Homo sapiens
aaatgcctttccagattttcttctgg

SEQ ID NO: 122061 - DNA, 26 bp, Homo sapiens
aatgcctttccagattttcttctggc

SEQ ID NO: 122062 - DNA, 26 bp, Homo sapiens
atgcctttccagattttcttctggca

SEQ ID NO: 122063 - DNA, 26 bp, Homo sapiens
tgcctttccagattttcttctggcac

SEQ ID NO: 122064 - DNA, 26 bp, Homo sapiens
gcctttccagattttcttctggcact

SEQ ID NO: 122065 - DNA, 26 bp, Homo sapiens
cctttccagattttcttctggcactt

SEQ ID NO: 122066 - DNA, 26 bp, Homo sapiens
ctttccagattttcttctggcacttc

SEQ ID NO: 122067 - DNA, 26 bp, Homo sapiens
tttccagattttcttctggcacttcg

SEQ ID NO: 122068 - DNA, 26 bp, Homo sapiens
ttccagattttcttctggcacttcgt

SEQ ID NO: 122069 - DNA, 26 bp, Homo sapiens
tccagattttcttctggcacttcgtc

SEQ ID NO: 122070 - DNA, 26 bp, Homo sapiens
ccagattttcttctggcacttcgtcc

SEQ ID NO: 122071 - DNA, 26 bp, Homo sapiens
cagattttcttctggcacttcgtcca

SEQ ID NO: 122072 - DNA, 26 bp, Homo sapiens
agattttcttctggcacttcgtccat

SEQ ID NO: 122073 - DNA, 26 bp, Homo sapiens
gattttcttctggcacttcgtccata

SEQ ID NO: 122074 - DNA, 26 bp, Homo sapiens
attttcttctggcacttcgtccatat

SEQ ID NO: 122075 - DNA, 26 bp, Homo sapiens
ttttcttctggcacttcgtccatatg

SEQ ID NO: 122076 - DNA, 26 bp, Homo sapiens
tttcttctggcacttcgtccatatga

SEQ ID NO: 122077 - DNA, 26 bp, Homo sapiens
ttcttctggcacttcgtccatatgat

SEQ ID NO: 122078 - DNA, 26 bp, Homo sapiens
tcttctggcacttcgtccatatgatt

SEQ ID NO: 122079 - DNA, 26 bp, Homo sapiens
cttctggcacttcgtccatatgattt

SEQ ID NO: 122080 - DNA, 26 bp, Homo sapiens
ttctggcacttcgtccatatgattta

SEQ ID NO: 122081 - DNA, 26 bp, Homo sapiens
tctggcacttcgtccatatgatttaa

SEQ ID NO: 122082 - DNA, 26 bp, Homo sapiens
ctggcacttcgtccatatgatttaaa

SEQ ID NO: 122083 - DNA, 26 bp, Homo sapiens
tggcacttcgtccatatgatttaaat

SEQ ID NO: 122084 - DNA, 26 bp, Homo sapiens
ggcacttcgtccatatgatttaaata

SEQ ID NO: 122085 - DNA, 26 bp, Homo sapiens
gcacttcgtccatatgatttaaatat

SEQ ID NO: 122086 - DNA, 26 bp, Homo sapiens
cacttcgtccatatgatttaaatatt

SEQ ID NO: 122087 - DNA, 26 bp, Homo sapiens
acttcgtccatatgatttaaatattg

SEQ ID NO: 122088 - DNA, 26 bp, Homo sapiens
cttcgtccatatgatttaaatattgc

SEQ ID NO: 122089 - DNA, 26 bp, Homo sapiens
ttcgtccatatgatttaaatattgct

SEQ ID NO: 122090 - DNA, 26 bp, Homo sapiens
tcgtccatatgatttaaatattgctt

SEQ ID NO: 122091 - DNA, 26 bp, Homo sapiens
cgtccatatgatttaaatattgcttg

SEQ ID NO: 122092 - DNA, 26 bp, Homo sapiens
gtccatatgatttaaatattgcttgt

SEQ ID NO: 122093 - DNA, 26 bp, Homo sapiens
tccatatgatttaaatattgcttgtc

SEQ ID NO: 122094 - DNA, 26 bp, Homo sapiens
ccatatgatttaaatattgcttgtca

SEQ ID NO: 122095 - DNA, 26 bp, Homo sapiens
catatgatttaaatattgcttgtcat

SEQ ID NO: 122096 - DNA, 26 bp, Homo sapiens
atatgatttaaatattgcttgtcatt

SEQ ID NO: 122097 - DNA, 26 bp, Homo sapiens
tatgatttaaatattgcttgtcattt

SEQ ID NO: 122098 - DNA, 26 bp, Homo sapiens
atgatttaaatattgcttgtcatttg

SEQ ID NO: 122099 - DNA, 26 bp, Homo sapiens
tgatttaaatattgcttgtcatttgt

SEQ ID NO: 122100 - DNA, 26 bp, Homo sapiens
gatttaaatattgcttgtcatttgta

SEQ ID NO: 122101 - DNA, 26 bp, Homo sapiens
atttaaatattgcttgtcatttgtag

SEQ ID NO: 122102 - DNA, 26 bp, Homo sapiens
tttaaatattgcttgtcatttgtagg

SEQ ID NO: 122103 - DNA, 26 bp, Homo sapiens
ttaaatattgcttgtcatttgtaggc

SEQ ID NO: 122104 - DNA, 26 bp, Homo sapiens
taaatattgcttgtcatttgtaggcc

SEQ ID NO: 122105 - DNA, 26 bp, Homo sapiens
aaatattgcttgtcatttgtaggccg

SEQ ID NO: 122106 - DNA, 26 bp, Homo sapiens
aatattgcttgtcatttgtaggccgg

SEQ ID NO: 122107 - DNA, 26 bp, Homo sapiens
atattgcttgtcatttgtaggccggt

SEQ ID NO: 122108 - DNA, 26 bp, Homo sapiens
tattgcttgtcatttgtaggccggtc

SEQ ID NO: 122109 - DNA, 26 bp, Homo sapiens
attgcttgtcatttgtaggccggtca

SEQ ID NO: 122110 - DNA, 26 bp, Homo sapiens
ttgcttgtcatttgtaggccggtcaa

SEQ ID NO: 122111 - DNA, 26 bp, Homo sapiens
tgcttgtcatttgtaggccggtcaaa

SEQ ID NO: 122112 - DNA, 26 bp, Homo sapiens
gcttgtcatttgtaggccggtcaaag

SEQ ID NO: 122113 - DNA, 26 bp, Homo sapiens
cttgtcatttgtaggccggtcaaaga

SEQ ID NO: 122114 - DNA, 26 bp, Homo sapiens
ttgtcatttgtaggccggtcaaagac

SEQ ID NO: 122115 - DNA, 26 bp, Homo sapiens
tgtcatttgtaggccggtcaaagaca

SEQ ID NO: 122116 - DNA, 26 bp, Homo sapiens
gtcatttgtaggccggtcaaagacaa

SEQ ID NO: 122117 - DNA, 26 bp, Homo sapiens
tcatttgtaggccggtcaaagacaaa

SEQ ID NO: 122118 - DNA, 26 bp, Homo sapiens
catttgtaggccggtcaaagacaaag

SEQ ID NO: 122119 - DNA, 26 bp, Homo sapiens
atttgtaggccggtcaaagacaaagc

SEQ ID NO: 122120 - DNA, 26 bp, Homo sapiens
tttgtaggccggtcaaagacaaagca

SEQ ID NO: 122121 - DNA, 26 bp, Homo sapiens
ttgtaggccggtcaaagacaaagcac

SEQ ID NO: 122122 - DNA, 26 bp, Homo sapiens
tgtaggccggtcaaagacaaagcact

SEQ ID NO: 122123 - DNA, 26 bp, Homo sapiens
gtaggccggtcaaagacaaagcactt

SEQ ID NO: 122124 - DNA, 26 bp, Homo sapiens
taggccggtcaaagacaaagcacttc

SEQ ID NO: 122125 - DNA, 26 bp, Homo sapiens
aggccggtcaaagacaaagcacttcc

SEQ ID NO: 122126 - DNA, 26 bp, Homo sapiens
ggccggtcaaagacaaagcacttccg

SEQ ID NO: 122127 - DNA, 26 bp, Homo sapiens
gccggtcaaagacaaagcacttccgt

SEQ ID NO: 122128 - DNA, 26 bp, Homo sapiens
ccggtcaaagacaaagcacttccgtt

SEQ ID NO: 122129 - DNA, 26 bp, Homo sapiens
cggtcaaagacaaagcacttccgttt

SEQ ID NO: 122130 - DNA, 26 bp, Homo sapiens
ggtcaaagacaaagcacttccgtttt

SEQ ID NO: 122131 - DNA, 26 bp, Homo sapiens
gtcaaagacaaagcacttccgttttc

SEQ ID NO: 122132 - DNA, 26 bp, Homo sapiens
tcaaagacaaagcacttccgttttcg

SEQ ID NO: 122133 - DNA, 26 bp, Homo sapiens
caaagacaaagcacttccgttttcgg

SEQ ID NO: 122134 - DNA, 26 bp, Homo sapiens
aaagacaaagcacttccgttttcgga

SEQ ID NO: 122135 - DNA, 26 bp, Homo sapiens
aagacaaagcacttccgttttcggaa

SEQ ID NO: 122136 - DNA, 26 bp, Homo sapiens
agacaaagcacttccgttttcggaag

SEQ ID NO: 122137 - DNA, 26 bp, Homo sapiens
gacaaagcacttccgttttcggaaga

SEQ ID NO: 122138 - DNA, 26 bp, Homo sapiens
acaaagcacttccgttttcggaagaa

SEQ ID NO: 122139 - DNA, 26 bp, Homo sapiens
caaagcacttccgttttcggaagaaa

SEQ ID NO: 122140 - DNA, 26 bp, Homo sapiens
aaagcacttccgttttcggaagaaat

SEQ ID NO: 122141 - DNA, 26 bp, Homo sapiens
aagcacttccgttttcggaagaaatg

SEQ ID NO: 122142 - DNA, 26 bp, Homo sapiens
agcacttccgttttcggaagaaatgc

SEQ ID NO: 122143 - DNA, 26 bp, Homo sapiens
gcacttccgttttcggaagaaatgcc

SEQ ID NO: 122144 - DNA, 26 bp, Homo sapiens
cacttccgttttcggaagaaatgcct

SEQ ID NO: 122145 - DNA, 26 bp, Homo sapiens
acttccgttttcggaagaaatgcctg

SEQ ID NO: 122146 - DNA, 26 bp, Homo sapiens
cttccgttttcggaagaaatgcctga

SEQ ID NO: 122147 - DNA, 26 bp, Homo sapiens
ttccgttttcggaagaaatgcctgat

SEQ ID NO: 122148 - DNA, 26 bp, Homo sapiens
tccgttttcggaagaaatgcctgata

SEQ ID NO: 122149 - DNA, 26 bp, Homo sapiens
ccgttttcggaagaaatgcctgatac

SEQ ID NO: 122150 - DNA, 26 bp, Homo sapiens
cgttttcggaagaaatgcctgataca

SEQ ID NO: 122151 - DNA, 26 bp, Homo sapiens
gttttcggaagaaatgcctgatacac

SEQ ID NO: 122152 - DNA, 26 bp, Homo sapiens
ttttcggaagaaatgcctgatacact

SEQ ID NO: 122153 - DNA, 26 bp, Homo sapiens
tttcggaagaaatgcctgatacactc

SEQ ID NO: 122154 - DNA, 26 bp, Homo sapiens
ttcggaagaaatgcctgatacactct

SEQ ID NO: 122155 - DNA, 26 bp, Homo sapiens
tcggaagaaatgcctgatacactctc

SEQ ID NO: 122156 - DNA, 26 bp, Homo sapiens
cggaagaaatgcctgatacactctct

SEQ ID NO: 122157 - DNA, 26 bp, Homo sapiens
ggaagaaatgcctgatacactctcta

SEQ ID NO: 122158 - DNA, 26 bp, Homo sapiens
gaagaaatgcctgatacactctctag

SEQ ID NO: 122159 - DNA, 26 bp, Homo sapiens
aagaaatgcctgatacactctctagg

SEQ ID NO: 122160 - DNA, 26 bp, Homo sapiens
agaaatgcctgatacactctctaggc

SEQ ID NO: 122161 - DNA, 26 bp, Homo sapiens
gaaatgcctgatacactctctaggca

SEQ ID NO: 122162 - DNA, 26 bp, Homo sapiens
aaatgcctgatacactctctaggcat

SEQ ID NO: 122163 - DNA, 26 bp, Homo sapiens
aatgcctgatacactctctaggcatg

SEQ ID NO: 122164 - DNA, 26 bp, Homo sapiens
atgcctgatacactctctaggcatgt

SEQ ID NO: 122165 - DNA, 26 bp, Homo sapiens
tgcctgatacactctctaggcatgtt

SEQ ID NO: 122166 - DNA, 26 bp, Homo sapiens
gcctgatacactctctaggcatgttt

SEQ ID NO: 122167 - DNA, 26 bp, Homo sapiens
cctgatacactctctaggcatgtttg

SEQ ID NO: 122168 - DNA, 26 bp, Homo sapiens
ctgatacactctctaggcatgtttga

SEQ ID NO: 122169 - DNA, 26 bp, Homo sapiens
tgatacactctctaggcatgtttgaa

SEQ ID NO: 122170 - DNA, 26 bp, Homo sapiens
gatacactctctaggcatgtttgaat

SEQ ID NO: 122171 - DNA, 26 bp, Homo sapiens
atacactctctaggcatgtttgaatt

SEQ ID NO: 122172 - DNA, 26 bp, Homo sapiens
tacactctctaggcatgtttgaattt

SEQ ID NO: 122173 - DNA, 26 bp, Homo sapiens
acactctctaggcatgtttgaatttt

SEQ ID NO: 122174 - DNA, 26 bp, Homo sapiens
cactctctaggcatgtttgaattttg

SEQ ID NO: 122175 - DNA, 26 bp, Homo sapiens
actctctaggcatgtttgaattttga

SEQ ID NO: 122176 - DNA, 26 bp, Homo sapiens
ctctctaggcatgtttgaattttgaa

SEQ ID NO: 122177 - DNA, 26 bp, Homo sapiens
tctctaggcatgtttgaattttgaat

SEQ ID NO: 122178 - DNA, 26 bp, Homo sapiens
ctctaggcatgtttgaattttgaatt

SEQ ID NO: 122179 - DNA, 26 bp, Homo sapiens
tctaggcatgtttgaattttgaattt

SEQ ID NO: 122180 - DNA, 26 bp, Homo sapiens
ctaggcatgtttgaattttgaatttt

SEQ ID NO: 122181 - DNA, 26 bp, Homo sapiens
taggcatgtttgaattttgaattttg

SEQ ID NO: 122182 - DNA, 26 bp, Homo sapiens
aggcatgtttgaattttgaattttgg

SEQ ID NO: 122183 - DNA, 26 bp, Homo sapiens
ggcatgtttgaattttgaattttggg

SEQ ID NO: 122184 - DNA, 26 bp, Homo sapiens
gcatgtttgaattttgaattttggga

SEQ ID NO: 122185 - DNA, 26 bp, Homo sapiens
catgtttgaattttgaattttgggat

SEQ ID NO: 122186 - DNA, 26 bp, Homo sapiens
atgtttgaattttgaattttgggatt

SEQ ID NO: 122187 - DNA, 26 bp, Homo sapiens
tgtttgaattttgaattttgggattc

SEQ ID NO: 122188 - DNA, 26 bp, Homo sapiens
gtttgaattttgaattttgggattct

SEQ ID NO: 122189 - DNA, 26 bp, Homo sapiens
tttgaattttgaattttgggattctt

SEQ ID NO: 122190 - DNA, 26 bp, Homo sapiens
ttgaattttgaattttgggattcttg

SEQ ID NO: 122191 - DNA, 26 bp, Homo sapiens
tgaattttgaattttgggattcttgc

SEQ ID NO: 122192 - DNA, 26 bp, Homo sapiens
gaattttgaattttgggattcttgcc

SEQ ID NO: 122193 - DNA, 26 bp, Homo sapiens
aattttgaattttgggattcttgcct

SEQ ID NO: 122194 - DNA, 26 bp, Homo sapiens
attttgaattttgggattcttgcctg

SEQ ID NO: 122195 - DNA, 26 bp, Homo sapiens
ttttgaattttgggattcttgcctgg

SEQ ID NO: 122196 - DNA, 26 bp, Homo sapiens
tttgaattttgggattcttgcctgga

SEQ ID NO: 122197 - DNA, 26 bp, Homo sapiens
ttgaattttgggattcttgcctggaa

SEQ ID NO: 122198 - DNA, 26 bp, Homo sapiens
tgaattttgggattcttgcctggaat

SEQ ID NO: 122199 - DNA, 26 bp, Homo sapiens
gaattttgggattcttgcctggaatc

SEQ ID NO: 122200 - DNA, 26 bp, Homo sapiens
aattttgggattcttgcctggaatca

SEQ ID NO: 122201 - DNA, 26 bp, Homo sapiens
attttgggattcttgcctggaatcag

SEQ ID NO: 122202 - DNA, 26 bp, Homo sapiens
ttttgggattcttgcctggaatcagc

SEQ ID NO: 122203 - DNA, 26 bp, Homo sapiens
tttgggattcttgcctggaatcagct

SEQ ID NO: 122204 - DNA, 26 bp, Homo sapiens
ttgggattcttgcctggaatcagctt

SEQ ID NO: 122205 - DNA, 26 bp, Homo sapiens
tgggattcttgcctggaatcagcttc

SEQ ID NO: 122206 - DNA, 26 bp, Homo sapiens
gggattcttgcctggaatcagcttca

SEQ ID NO: 122207 - DNA, 26 bp, Homo sapiens
ggattcttgcctggaatcagcttcaa

SEQ ID NO: 122208 - DNA, 26 bp, Homo sapiens
gattcttgcctggaatcagcttcaag

SEQ ID NO: 122209 - DNA, 26 bp, Homo sapiens
attcttgcctggaatcagcttcaagg

SEQ ID NO: 122210 - DNA, 26 bp, Homo sapiens
ttcttgcctggaatcagcttcaaggc

SEQ ID NO: 122211 - DNA, 26 bp, Homo sapiens
tcttgcctggaatcagcttcaaggca

SEQ ID NO: 122212 - DNA, 26 bp, Homo sapiens
cttgcctggaatcagcttcaaggcat

SEQ ID NO: 122213 - DNA, 26 bp, Homo sapiens
ttgcctggaatcagcttcaaggcatt

SEQ ID NO: 122214 - DNA, 26 bp, Homo sapiens
tgcctggaatcagcttcaaggcattc

SEQ ID NO: 122215 - DNA, 26 bp, Homo sapiens
gcctggaatcagcttcaaggcattct

SEQ ID NO: 122216 - DNA, 26 bp, Homo sapiens
cctggaatcagcttcaaggcattctc

SEQ ID NO: 122217 - DNA, 26 bp, Homo sapiens
ctggaatcagcttcaaggcattctcc

SEQ ID NO: 122218 - DNA, 26 bp, Homo sapiens
tggaatcagcttcaaggcattctcca

SEQ ID NO: 122219 - DNA, 26 bp, Homo sapiens
ggaatcagcttcaaggcattctccag

SEQ ID NO: 122220 - DNA, 26 bp, Homo sapiens
gaatcagcttcaaggcattctccagg

SEQ ID NO: 122221 - DNA, 26 bp, Homo sapiens
aatcagcttcaaggcattctccaggt

SEQ ID NO: 122222 - DNA, 26 bp, Homo sapiens
atcagcttcaaggcattctccaggta

SEQ ID NO: 122223 - DNA, 26 bp, Homo sapiens
tcagcttcaaggcattctccaggtac

SEQ ID NO: 122224 - DNA, 26 bp, Homo sapiens
cagcttcaaggcattctccaggtact

SEQ ID NO: 122225 - DNA, 26 bp, Homo sapiens
agcttcaaggcattctccaggtactc

SEQ ID NO: 122226 - DNA, 26 bp, Homo sapiens
gcttcaaggcattctccaggtactca

SEQ ID NO: 122227 - DNA, 26 bp, Homo sapiens
cttcaaggcattctccaggtactcat

SEQ ID NO: 122228 - DNA, 26 bp, Homo sapiens
ttcaaggcattctccaggtactcatc

SEQ ID NO: 122229 - DNA, 26 bp, Homo sapiens
tcaaggcattctccaggtactcatct

SEQ ID NO: 122230 - DNA, 26 bp, Homo sapiens
caaggcattctccaggtactcatctt

SEQ ID NO: 122231 - DNA, 26 bp, Homo sapiens
aaggcattctccaggtactcatcttc

SEQ ID NO: 122232 - DNA, 26 bp, Homo sapiens
aggcattctccaggtactcatcttct

SEQ ID NO: 122233 - DNA, 26 bp, Homo sapiens
ggcattctccaggtactcatcttctg

SEQ ID NO: 122234 - DNA, 26 bp, Homo sapiens
gcattctccaggtactcatcttctgt

SEQ ID NO: 122235 - DNA, 26 bp, Homo sapiens
cattctccaggtactcatcttctgtg

SEQ ID NO: 122236 - DNA, 26 bp, Homo sapiens
attctccaggtactcatcttctgtga

SEQ ID NO: 122237 - DNA, 26 bp, Homo sapiens
ttctccaggtactcatcttctgtgat

SEQ ID NO: 122238 - DNA, 26 bp, Homo sapiens
tctccaggtactcatcttctgtgatg

SEQ ID NO: 122239 - DNA, 26 bp, Homo sapiens
ctccaggtactcatcttctgtgatgg

SEQ ID NO: 122240 - DNA, 26 bp, Homo sapiens
tccaggtactcatcttctgtgatggg

SEQ ID NO: 122241 - DNA, 26 bp, Homo sapiens
ccaggtactcatcttctgtgatgggg

SEQ ID NO: 122242 - DNA, 26 bp, Homo sapiens
caggtactcatcttctgtgatggggt

SEQ ID NO: 122243 - DNA, 26 bp, Homo sapiens
aggtactcatcttctgtgatggggtt

SEQ ID NO: 122244 - DNA, 26 bp, Homo sapiens
ggtactcatcttctgtgatggggttt

SEQ ID NO: 122245 - DNA, 26 bp, Homo sapiens
gtactcatcttctgtgatggggtttc

SEQ ID NO: 122246 - DNA, 26 bp, Homo sapiens
tactcatcttctgtgatggggtttcc

SEQ ID NO: 122247 - DNA, 26 bp, Homo sapiens
actcatcttctgtgatggggtttcca

SEQ ID NO: 122248 - DNA, 26 bp, Homo sapiens
ctcatcttctgtgatggggtttccat

SEQ ID NO: 122249 - DNA, 26 bp, Homo sapiens
tcatcttctgtgatggggtttccatc

SEQ ID NO: 122250 - DNA, 26 bp, Homo sapiens
catcttctgtgatggggtttccatct

SEQ ID NO: 122251 - DNA, 26 bp, Homo sapiens
atcttctgtgatggggtttccatcta

SEQ ID NO: 122252 - DNA, 26 bp, Homo sapiens
tcttctgtgatggggtttccatctaa

SEQ ID NO: 122253 - DNA, 26 bp, Homo sapiens
cttctgtgatggggtttccatctaac

SEQ ID NO: 122254 - DNA, 26 bp, Homo sapiens
ttctgtgatggggtttccatctaact

SEQ ID NO: 122255 - DNA, 26 bp, Homo sapiens
tctgtgatggggtttccatctaactt

SEQ ID NO: 122256 - DNA, 26 bp, Homo sapiens
ctgtgatggggtttccatctaacttt

SEQ ID NO: 122257 - DNA, 26 bp, Homo sapiens
tgtgatggggtttccatctaacttta

SEQ ID NO: 122258 - DNA, 26 bp, Homo sapiens
gtgatggggtttccatctaactttag

SEQ ID NO: 122259 - DNA, 26 bp, Homo sapiens
tgatggggtttccatctaactttagc

SEQ ID NO: 122260 - DNA, 26 bp, Homo sapiens
gatggggtttccatctaactttagct

SEQ ID NO: 122261 - DNA, 26 bp, Homo sapiens
atggggtttccatctaactttagctc

SEQ ID NO: 122262 - DNA, 26 bp, Homo sapiens
tggggtttccatctaactttagctcc

SEQ ID NO: 122263 - DNA, 26 bp, Homo sapiens
ggggtttccatctaactttagctcca

SEQ ID NO: 122264 - DNA, 26 bp, Homo sapiens
gggtttccatctaactttagctccag

SEQ ID NO: 122265 - DNA, 26 bp, Homo sapiens
ggtttccatctaactttagctccagg

SEQ ID NO: 122266 - DNA, 26 bp, Homo sapiens
gtttccatctaactttagctccaggg

SEQ ID NO: 122267 - DNA, 26 bp, Homo sapiens
tttccatctaactttagctccagggt

SEQ ID NO: 122268 - DNA, 26 bp, Homo sapiens
ttccatctaactttagctccagggta

SEQ ID NO: 122269 - DNA, 26 bp, Homo sapiens
tccatctaactttagctccagggtaa

SEQ ID NO: 122270 - DNA, 26 bp, Homo sapiens
ccatctaactttagctccagggtaaa

SEQ ID NO: 122271 - DNA, 26 bp, Homo sapiens
catctaactttagctccagggtaaaa

SEQ ID NO: 122272 - DNA, 26 bp, Homo sapiens
atctaactttagctccagggtaaaat

SEQ ID NO: 122273 - DNA, 26 bp, Homo sapiens
tctaactttagctccagggtaaaatc

SEQ ID NO: 122274 - DNA, 26 bp, Homo sapiens
ctaactttagctccagggtaaaatcc

SEQ ID NO: 122275 - DNA, 26 bp, Homo sapiens
taactttagctccagggtaaaatccc

SEQ ID NO: 122276 - DNA, 26 bp, Homo sapiens
aactttagctccagggtaaaatcccg

SEQ ID NO: 122277 - DNA, 26 bp, Homo sapiens
actttagctccagggtaaaatcccga

SEQ ID NO: 122278 - DNA, 26 bp, Homo sapiens
ctttagctccagggtaaaatcccgaa

SEQ ID NO: 122279 - DNA, 26 bp, Homo sapiens
tttagctccagggtaaaatcccgaac

SEQ ID NO: 122280 - DNA, 26 bp, Homo sapiens
ttagctccagggtaaaatcccgaaca

SEQ ID NO: 122281 - DNA, 26 bp, Homo sapiens
tagctccagggtaaaatcccgaacag

SEQ ID NO: 122282 - DNA, 26 bp, Homo sapiens
agctccagggtaaaatcccgaacagt

SEQ ID NO: 122283 - DNA, 26 bp, Homo sapiens
gctccagggtaaaatcccgaacagtc

SEQ ID NO: 122284 - DNA, 26 bp, Homo sapiens
ctccagggtaaaatcccgaacagtcc

SEQ ID NO: 122285 - DNA, 26 bp, Homo sapiens
tccagggtaaaatcccgaacagtcca

SEQ ID NO: 122286 - DNA, 26 bp, Homo sapiens
ccagggtaaaatcccgaacagtccaa

SEQ ID NO: 122287 - DNA, 26 bp, Homo sapiens
cagggtaaaatcccgaacagtccaaa

SEQ ID NO: 122288 - DNA, 26 bp, Homo sapiens
agggtaaaatcccgaacagtccaaat

SEQ ID NO: 122289 - DNA, 26 bp, Homo sapiens
gggtaaaatcccgaacagtccaaata

SEQ ID NO: 122290 - DNA, 26 bp, Homo sapiens
ggtaaaatcccgaacagtccaaataa

SEQ ID NO: 122291 - DNA, 26 bp, Homo sapiens
gtaaaatcccgaacagtccaaataaa

SEQ ID NO: 122292 - DNA, 26 bp, Homo sapiens
taaaatcccgaacagtccaaataaag

SEQ ID NO: 122293 - DNA, 26 bp, Homo sapiens
aaaatcccgaacagtccaaataaagt

SEQ ID NO: 122294 - DNA, 26 bp, Homo sapiens
aaatcccgaacagtccaaataaagtc

SEQ ID NO: 122295 - DNA, 26 bp, Homo sapiens
aatcccgaacagtccaaataaagtct

SEQ ID NO: 122296 - DNA, 26 bp, Homo sapiens
atcccgaacagtccaaataaagtctg

SEQ ID NO: 122297 - DNA, 26 bp, Homo sapiens
tcccgaacagtccaaataaagtctgg

SEQ ID NO: 122298 - DNA, 26 bp, Homo sapiens
cccgaacagtccaaataaagtctgga

SEQ ID NO: 122299 - DNA, 26 bp, Homo sapiens
ccgaacagtccaaataaagtctggaa

SEQ ID NO: 122300 - DNA, 26 bp, Homo sapiens
cgaacagtccaaataaagtctggaaa

SEQ ID NO: 122301 - DNA, 26 bp, Homo sapiens
gaacagtccaaataaagtctggaaag

SEQ ID NO: 122302 - DNA, 26 bp, Homo sapiens
aacagtccaaataaagtctggaaaga

SEQ ID NO: 122303 - DNA, 26 bp, Homo sapiens
acagtccaaataaagtctggaaagaa

SEQ ID NO: 122304 - DNA, 26 bp, Homo sapiens
cagtccaaataaagtctggaaagaaa

SEQ ID NO: 122305 - DNA, 26 bp, Homo sapiens
agtccaaataaagtctggaaagaaac

SEQ ID NO: 122306 - DNA, 26 bp, Homo sapiens
gtccaaataaagtctggaaagaaact

SEQ ID NO: 122307 - DNA, 26 bp, Homo sapiens
tccaaataaagtctggaaagaaactc

SEQ ID NO: 122308 - DNA, 26 bp, Homo sapiens
ccaaataaagtctggaaagaaactcg

SEQ ID NO: 122309 - DNA, 26 bp, Homo sapiens
caaataaagtctggaaagaaactcgc

SEQ ID NO: 122310 - DNA, 26 bp, Homo sapiens
aaataaagtctggaaagaaactcgca

SEQ ID NO: 122311 - DNA, 26 bp, Homo sapiens
aataaagtctggaaagaaactcgcaa

SEQ ID NO: 122312 - DNA, 26 bp, Homo sapiens
ataaagtctggaaagaaactcgcaaa

SEQ ID NO: 122313 - DNA, 26 bp, Homo sapiens
taaagtctggaaagaaactcgcaaac

SEQ ID NO: 122314 - DNA, 26 bp, Homo sapiens
aaagtctggaaagaaactcgcaaact

SEQ ID NO: 122315 - DNA, 26 bp, Homo sapiens
aagtctggaaagaaactcgcaaactc

SEQ ID NO: 122316 - DNA, 26 bp, Homo sapiens
agtctggaaagaaactcgcaaactcg

SEQ ID NO: 122317 - DNA, 26 bp, Homo sapiens
gtctggaaagaaactcgcaaactcgc

SEQ ID NO: 122318 - DNA, 26 bp, Homo sapiens
tctggaaagaaactcgcaaactcgct

SEQ ID NO: 122319 - DNA, 26 bp, Homo sapiens
ctggaaagaaactcgcaaactcgctg

SEQ ID NO: 122320 - DNA, 26 bp, Homo sapiens
tggaaagaaactcgcaaactcgctgg

SEQ ID NO: 122321 - DNA, 26 bp, Homo sapiens
ggaaagaaactcgcaaactcgctgga

SEQ ID NO: 122322 - DNA, 26 bp, Homo sapiens
gaaagaaactcgcaaactcgctggag

SEQ ID NO: 122323 - DNA, 26 bp, Homo sapiens
aaagaaactcgcaaactcgctggagt

SEQ ID NO: 122324 - DNA, 26 bp, Homo sapiens
aagaaactcgcaaactcgctggagtc

SEQ ID NO: 122325 - DNA, 26 bp, Homo sapiens
agaaactcgcaaactcgctggagtcc

SEQ ID NO: 122326 - DNA, 26 bp, Homo sapiens
gaaactcgcaaactcgctggagtcct

SEQ ID NO: 122327 - DNA, 26 bp, Homo sapiens
aaactcgcaaactcgctggagtcctc

SEQ ID NO: 122328 - DNA, 26 bp, Homo sapiens
aactcgcaaactcgctggagtcctca

SEQ ID NO: 122329 - DNA, 26 bp, Homo sapiens
actcgcaaactcgctggagtcctcag

SEQ ID NO: 122330 - DNA, 26 bp, Homo sapiens
ctcgcaaactcgctggagtcctcagc

SEQ ID NO: 122331 - DNA, 26 bp, Homo sapiens
tcgcaaactcgctggagtcctcagct

SEQ ID NO: 122332 - DNA, 26 bp, Homo sapiens
cgcaaactcgctggagtcctcagctt

SEQ ID NO: 122333 - DNA, 26 bp, Homo sapiens
gcaaactcgctggagtcctcagcttc

SEQ ID NO: 122334 - DNA, 26 bp, Homo sapiens
caaactcgctggagtcctcagcttca

SEQ ID NO: 122335 - DNA, 26 bp, Homo sapiens
aaactcgctggagtcctcagcttcat

SEQ ID NO: 122336 - DNA, 26 bp, Homo sapiens
aactcgctggagtcctcagcttcatc

SEQ ID NO: 122337 - DNA, 26 bp, Homo sapiens
actcgctggagtcctcagcttcatca

SEQ ID NO: 122338 - DNA, 26 bp, Homo sapiens
ctcgctggagtcctcagcttcatcag

SEQ ID NO: 122339 - DNA, 26 bp, Homo sapiens
tcgctggagtcctcagcttcatcagg

SEQ ID NO: 122340 - DNA, 26 bp, Homo sapiens
cgctggagtcctcagcttcatcaggt

SEQ ID NO: 122341 - DNA, 26 bp, Homo sapiens
gctggagtcctcagcttcatcaggtc

SEQ ID NO: 122342 - DNA, 26 bp, Homo sapiens
ctggagtcctcagcttcatcaggtct

SEQ ID NO: 122343 - DNA, 26 bp, Homo sapiens
tggagtcctcagcttcatcaggtctg

SEQ ID NO: 122344 - DNA, 26 bp, Homo sapiens
ggagtcctcagcttcatcaggtctgg

SEQ ID NO: 122345 - DNA, 26 bp, Homo sapiens
gagtcctcagcttcatcaggtctggg

SEQ ID NO: 122346 - DNA, 26 bp, Homo sapiens
agtcctcagcttcatcaggtctgggg

SEQ ID NO: 122347 - DNA, 26 bp, Homo sapiens
gtcctcagcttcatcaggtctggggc

SEQ ID NO: 122348 - DNA, 26 bp, Homo sapiens
tcctcagcttcatcaggtctggggca

SEQ ID NO: 122349 - DNA, 26 bp, Homo sapiens
cctcagcttcatcaggtctggggcag

SEQ ID NO: 122350 - DNA, 26 bp, Homo sapiens
ctcagcttcatcaggtctggggcagg

SEQ ID NO: 122351 - DNA, 26 bp, Homo sapiens
tcagcttcatcaggtctggggcagga

SEQ ID NO: 122352 - DNA, 26 bp, Homo sapiens
cagcttcatcaggtctggggcaggat

SEQ ID NO: 122353 - DNA, 26 bp, Homo sapiens
agcttcatcaggtctggggcaggatt

SEQ ID NO: 122354 - DNA, 26 bp, Homo sapiens
gcttcatcaggtctggggcaggattt

SEQ ID NO: 122355 - DNA, 26 bp, Homo sapiens
cttcatcaggtctggggcaggatttt

SEQ ID NO: 122356 - DNA, 26 bp, Homo sapiens
ttcatcaggtctggggcaggattttg

SEQ ID NO: 122357 - DNA, 26 bp, Homo sapiens
tcatcaggtctggggcaggattttgc

SEQ ID NO: 122358 - DNA, 26 bp, Homo sapiens
catcaggtctggggcaggattttgcc

SEQ ID NO: 122359 - DNA, 26 bp, Homo sapiens
atcaggtctggggcaggattttgccc

SEQ ID NO: 122360 - DNA, 26 bp, Homo sapiens
tcaggtctggggcaggattttgccct

SEQ ID NO: 122361 - DNA, 26 bp, Homo sapiens
caggtctggggcaggattttgccctg

SEQ ID NO: 122362 - DNA, 26 bp, Homo sapiens
aggtctggggcaggattttgccctga

SEQ ID NO: 122363 - DNA, 26 bp, Homo sapiens
ggtctggggcaggattttgccctgat

SEQ ID NO: 122364 - DNA, 26 bp, Homo sapiens
gtctggggcaggattttgccctgatt

SEQ ID NO: 122365 - DNA, 26 bp, Homo sapiens
tctggggcaggattttgccctgatta

SEQ ID NO: 122366 - DNA, 26 bp, Homo sapiens
ctggggcaggattttgccctgattag

SEQ ID NO: 122367 - DNA, 26 bp, Homo sapiens
tggggcaggattttgccctgattagc

SEQ ID NO: 122368 - DNA, 26 bp, Homo sapiens
ggggcaggattttgccctgattagct

SEQ ID NO: 122369 - DNA, 26 bp, Homo sapiens
gggcaggattttgccctgattagctc

SEQ ID NO: 122370 - DNA, 26 bp, Homo sapiens
ggcaggattttgccctgattagctct

SEQ ID NO: 122371 - DNA, 26 bp, Homo sapiens
gcaggattttgccctgattagctctg

SEQ ID NO: 122372 - DNA, 26 bp, Homo sapiens
caggattttgccctgattagctctgc

SEQ ID NO: 122373 - DNA, 26 bp, Homo sapiens
aggattttgccctgattagctctgct

SEQ ID NO: 122374 - DNA, 26 bp, Homo sapiens
ggattttgccctgattagctctgcta

SEQ ID NO: 122375 - DNA, 26 bp, Homo sapiens
gattttgccctgattagctctgctag

SEQ ID NO: 122376 - DNA, 26 bp, Homo sapiens
attttgccctgattagctctgctagc

SEQ ID NO: 122377 - DNA, 26 bp, Homo sapiens
ttttgccctgattagctctgctagct

SEQ ID NO: 122378 - DNA, 26 bp, Homo sapiens
tttgccctgattagctctgctagctc

SEQ ID NO: 122379 - DNA, 26 bp, Homo sapiens
ttgccctgattagctctgctagctca

SEQ ID NO: 122380 - DNA, 26 bp, Homo sapiens
tgccctgattagctctgctagctcag

SEQ ID NO: 122381 - DNA, 26 bp, Homo sapiens
gccctgattagctctgctagctcagt

SEQ ID NO: 122382 - DNA, 26 bp, Homo sapiens
ccctgattagctctgctagctcagtc

SEQ ID NO: 122383 - DNA, 26 bp, Homo sapiens
cctgattagctctgctagctcagtca

SEQ ID NO: 122384 - DNA, 26 bp, Homo sapiens
ctgattagctctgctagctcagtcac

SEQ ID NO: 122385 - DNA, 26 bp, Homo sapiens
tgattagctctgctagctcagtcaca

SEQ ID NO: 122386 - DNA, 26 bp, Homo sapiens
gattagctctgctagctcagtcacat

SEQ ID NO: 122387 - DNA, 26 bp, Homo sapiens
attagctctgctagctcagtcacata

SEQ ID NO: 122388 - DNA, 26 bp, Homo sapiens
ttagctctgctagctcagtcacatag

SEQ ID NO: 122389 - DNA, 26 bp, Homo sapiens
tagctctgctagctcagtcacatagt

SEQ ID NO: 122390 - DNA, 26 bp, Homo sapiens
agctctgctagctcagtcacatagtg

SEQ ID NO: 122391 - DNA, 26 bp, Homo sapiens
gctctgctagctcagtcacatagtgc

SEQ ID NO: 122392 - DNA, 26 bp, Homo sapiens
ctctgctagctcagtcacatagtgca

SEQ ID NO: 122393 - DNA, 26 bp, Homo sapiens
tctgctagctcagtcacatagtgcag

SEQ ID NO: 122394 - DNA, 26 bp, Homo sapiens
ctgctagctcagtcacatagtgcagc

SEQ ID NO: 122395 - DNA, 26 bp, Homo sapiens
tgctagctcagtcacatagtgcagct

SEQ ID NO: 122396 - DNA, 26 bp, Homo sapiens
gctagctcagtcacatagtgcagctg

SEQ ID NO: 122397 - DNA, 26 bp, Homo sapiens
ctagctcagtcacatagtgcagctgc

SEQ ID NO: 122398 - DNA, 26 bp, Homo sapiens
tagctcagtcacatagtgcagctgct

SEQ ID NO: 122399 - DNA, 26 bp, Homo sapiens
agctcagtcacatagtgcagctgctc

SEQ ID NO: 122400 - DNA, 26 bp, Homo sapiens
gctcagtcacatagtgcagctgctcc

SEQ ID NO: 122401 - DNA, 26 bp, Homo sapiens
ctcagtcacatagtgcagctgctcca

SEQ ID NO: 122402 - DNA, 26 bp, Homo sapiens
tcagtcacatagtgcagctgctccag

SEQ ID NO: 122403 - DNA, 26 bp, Homo sapiens
cagtcacatagtgcagctgctccagg

SEQ ID NO: 122404 - DNA, 26 bp, Homo sapiens
agtcacatagtgcagctgctccaggg

SEQ ID NO: 122405 - DNA, 26 bp, Homo sapiens
gtcacatagtgcagctgctccagggc

SEQ ID NO: 122406 - DNA, 26 bp, Homo sapiens
tcacatagtgcagctgctccagggcc

SEQ ID NO: 122407 - DNA, 26 bp, Homo sapiens
cacatagtgcagctgctccagggcct

SEQ ID NO: 122408 - DNA, 26 bp, Homo sapiens
acatagtgcagctgctccagggcctg

SEQ ID NO: 122409 - DNA, 26 bp, Homo sapiens
catagtgcagctgctccagggcctgg

SEQ ID NO: 122410 - DNA, 26 bp, Homo sapiens
atagtgcagctgctccagggcctggt

SEQ ID NO: 122411 - DNA, 26 bp, Homo sapiens
tagtgcagctgctccagggcctggtg

SEQ ID NO: 122412 - DNA, 26 bp, Homo sapiens
agtgcagctgctccagggcctggtgg

SEQ ID NO: 122413 - DNA, 26 bp, Homo sapiens
gtgcagctgctccagggcctggtggt

SEQ ID NO: 122414 - DNA, 26 bp, Homo sapiens
tgcagctgctccagggcctggtggtt

SEQ ID NO: 122415 - DNA, 26 bp, Homo sapiens
gcagctgctccagggcctggtggttg

SEQ ID NO: 122416 - DNA, 26 bp, Homo sapiens
cagctgctccagggcctggtggttga

SEQ ID NO: 122417 - DNA, 26 bp, Homo sapiens
agctgctccagggcctggtggttgat

SEQ ID NO: 122418 - DNA, 26 bp, Homo sapiens
gctgctccagggcctggtggttgatg

SEQ ID NO: 122419 - DNA, 26 bp, Homo sapiens
ctgctccagggcctggtggttgatgg

SEQ ID NO: 122420 - DNA, 26 bp, Homo sapiens
tgctccagggcctggtggttgatggt

SEQ ID NO: 122421 - DNA, 26 bp, Homo sapiens
gctccagggcctggtggttgatggtg

SEQ ID NO: 122422 - DNA, 26 bp, Homo sapiens
ctccagggcctggtggttgatggtgc

SEQ ID NO: 122423 - DNA, 26 bp, Homo sapiens
tccagggcctggtggttgatggtgct

SEQ ID NO: 122424 - DNA, 26 bp, Homo sapiens
ccagggcctggtggttgatggtgctc

SEQ ID NO: 122425 - DNA, 26 bp, Homo sapiens
cagggcctggtggttgatggtgctca

SEQ ID NO: 122426 - DNA, 26 bp, Homo sapiens
agggcctggtggttgatggtgctcac

SEQ ID NO: 122427 - DNA, 26 bp, Homo sapiens
gggcctggtggttgatggtgctcacg

SEQ ID NO: 122428 - DNA, 26 bp, Homo sapiens
ggcctggtggttgatggtgctcacgc

SEQ ID NO: 122429 - DNA, 26 bp, Homo sapiens
gcctggtggttgatggtgctcacgct

SEQ ID NO: 122430 - DNA, 26 bp, Homo sapiens
cctggtggttgatggtgctcacgctg

SEQ ID NO: 122431 - DNA, 26 bp, Homo sapiens
ctggtggttgatggtgctcacgctgt

SEQ ID NO: 122432 - DNA, 26 bp, Homo sapiens
tggtggttgatggtgctcacgctgtt

SEQ ID NO: 122433 - DNA, 26 bp, Homo sapiens
ggtggttgatggtgctcacgctgtta

SEQ ID NO: 122434 - DNA, 26 bp, Homo sapiens
gtggttgatggtgctcacgctgttat

SEQ ID NO: 122435 - DNA, 26 bp, Homo sapiens
tggttgatggtgctcacgctgttata

SEQ ID NO: 122436 - DNA, 26 bp, Homo sapiens
ggttgatggtgctcacgctgttatag

SEQ ID NO: 122437 - DNA, 26 bp, Homo sapiens
gttgatggtgctcacgctgttataga

SEQ ID NO: 122438 - DNA, 26 bp, Homo sapiens
ttgatggtgctcacgctgttatagac

SEQ ID NO: 122439 - DNA, 26 bp, Homo sapiens
tgatggtgctcacgctgttatagaca

SEQ ID NO: 122440 - DNA, 26 bp, Homo sapiens
gatggtgctcacgctgttatagacaa

SEQ ID NO: 122441 - DNA, 26 bp, Homo sapiens
atggtgctcacgctgttatagacaaa

SEQ ID NO: 122442 - DNA, 26 bp, Homo sapiens
tggtgctcacgctgttatagacaaag

SEQ ID NO: 122443 - DNA, 26 bp, Homo sapiens
ggtgctcacgctgttatagacaaagc

SEQ ID NO: 122444 - DNA, 26 bp, Homo sapiens
gtgctcacgctgttatagacaaagct

SEQ ID NO: 122445 - DNA, 26 bp, Homo sapiens
tgctcacgctgttatagacaaagctg

SEQ ID NO: 122446 - DNA, 26 bp, Homo sapiens
gctcacgctgttatagacaaagctgc

SEQ ID NO: 122447 - DNA, 26 bp, Homo sapiens
ctcacgctgttatagacaaagctgct

SEQ ID NO: 122448 - DNA, 26 bp, Homo sapiens
tcacgctgttatagacaaagctgctg

SEQ ID NO: 122449 - DNA, 26 bp, Homo sapiens
cacgctgttatagacaaagctgctgc

SEQ ID NO: 122450 - DNA, 26 bp, Homo sapiens
acgctgttatagacaaagctgctgct

SEQ ID NO: 122451 - DNA, 26 bp, Homo sapiens
cgctgttatagacaaagctgctgctt

SEQ ID NO: 122452 - DNA, 26 bp, Homo sapiens
gctgttatagacaaagctgctgctta

SEQ ID NO: 122453 - DNA, 26 bp, Homo sapiens
ctgttatagacaaagctgctgcttag

SEQ ID NO: 122454 - DNA, 26 bp, Homo sapiens
tgttatagacaaagctgctgcttaga

SEQ ID NO: 122455 - DNA, 26 bp, Homo sapiens
gttatagacaaagctgctgcttagaa

SEQ ID NO: 122456 - DNA, 26 bp, Homo sapiens
ttatagacaaagctgctgcttagaag

SEQ ID NO: 122457 - DNA, 26 bp, Homo sapiens
tatagacaaagctgctgcttagaagc

SEQ ID NO: 122458 - DNA, 26 bp, Homo sapiens
atagacaaagctgctgcttagaagca

SEQ ID NO: 122459 - DNA, 26 bp, Homo sapiens
tagacaaagctgctgcttagaagcac

SEQ ID NO: 122460 - DNA, 26 bp, Homo sapiens
agacaaagctgctgcttagaagcaca

SEQ ID NO: 122461 - DNA, 26 bp, Homo sapiens
gacaaagctgctgcttagaagcacag

SEQ ID NO: 122462 - DNA, 26 bp, Homo sapiens
acaaagctgctgcttagaagcacagc

SEQ ID NO: 122463 - DNA, 26 bp, Homo sapiens
caaagctgctgcttagaagcacagcc

SEQ ID NO: 122464 - DNA, 26 bp, Homo sapiens
aaagctgctgcttagaagcacagcca

SEQ ID NO: 122465 - DNA, 26 bp, Homo sapiens
aagctgctgcttagaagcacagccag

SEQ ID NO: 122466 - DNA, 26 bp, Homo sapiens
agctgctgcttagaagcacagccagg

SEQ ID NO: 122467 - DNA, 26 bp, Homo sapiens
gctgctgcttagaagcacagccaggg

SEQ ID NO: 122468 - DNA, 26 bp, Homo sapiens
ctgctgcttagaagcacagccagggc

SEQ ID NO: 122469 - DNA, 26 bp, Homo sapiens
tgctgcttagaagcacagccagggca

SEQ ID NO: 122470 - DNA, 26 bp, Homo sapiens
gctgcttagaagcacagccagggcaa

SEQ ID NO: 122471 - DNA, 26 bp, Homo sapiens
ctgcttagaagcacagccagggcaaa

SEQ ID NO: 122472 - DNA, 26 bp, Homo sapiens
tgcttagaagcacagccagggcaaag

SEQ ID NO: 122473 - DNA, 26 bp, Homo sapiens
gcttagaagcacagccagggcaaaga

SEQ ID NO: 122474 - DNA, 26 bp, Homo sapiens
cttagaagcacagccagggcaaagat

SEQ ID NO: 122475 - DNA, 26 bp, Homo sapiens
ttagaagcacagccagggcaaagatc

SEQ ID NO: 122476 - DNA, 26 bp, Homo sapiens
tagaagcacagccagggcaaagatcc

SEQ ID NO: 122477 - DNA, 26 bp, Homo sapiens
agaagcacagccagggcaaagatcca

SEQ ID NO: 122478 - DNA, 26 bp, Homo sapiens
gaagcacagccagggcaaagatccac

SEQ ID NO: 122479 - DNA, 26 bp, Homo sapiens
aagcacagccagggcaaagatccacg

SEQ ID NO: 122480 - DNA, 26 bp, Homo sapiens
agcacagccagggcaaagatccacga

SEQ ID NO: 122481 - DNA, 26 bp, Homo sapiens
gcacagccagggcaaagatccacgag

SEQ ID NO: 122482 - DNA, 26 bp, Homo sapiens
cacagccagggcaaagatccacgagt

SEQ ID NO: 122483 - DNA, 26 bp, Homo sapiens
acagccagggcaaagatccacgagtc

SEQ ID NO: 122484 - DNA, 26 bp, Homo sapiens
cagccagggcaaagatccacgagtca

SEQ ID NO: 122485 - DNA, 26 bp, Homo sapiens
agccagggcaaagatccacgagtcat

SEQ ID NO: 122486 - DNA, 26 bp, Homo sapiens
gccagggcaaagatccacgagtcatt

SEQ ID NO: 122487 - DNA, 26 bp, Homo sapiens
ccagggcaaagatccacgagtcattc

SEQ ID NO: 122488 - DNA, 26 bp, Homo sapiens
cagggcaaagatccacgagtcattct

SEQ ID NO: 122489 - DNA, 26 bp, Homo sapiens
agggcaaagatccacgagtcattctt

SEQ ID NO: 122490 - DNA, 26 bp, Homo sapiens
gggcaaagatccacgagtcattctta

SEQ ID NO: 122491 - DNA, 26 bp, Homo sapiens
ggcaaagatccacgagtcattcttag

SEQ ID NO: 122492 - DNA, 26 bp, Homo sapiens
gcaaagatccacgagtcattcttagg

SEQ ID NO: 122493 - DNA, 26 bp, Homo sapiens
caaagatccacgagtcattcttaggg

SEQ ID NO: 122494 - DNA, 26 bp, Homo sapiens
aaagatccacgagtcattcttagggt

SEQ ID NO: 122495 - DNA, 26 bp, Homo sapiens
aagatccacgagtcattcttagggtt

SEQ ID NO: 122496 - DNA, 26 bp, Homo sapiens
agatccacgagtcattcttagggtta

SEQ ID NO: 122497 - DNA, 26 bp, Homo sapiens
gatccacgagtcattcttagggttac

SEQ ID NO: 122498 - DNA, 26 bp, Homo sapiens
atccacgagtcattcttagggttact

SEQ ID NO: 122499 - DNA, 26 bp, Homo sapiens
tccacgagtcattcttagggttactc

SEQ ID NO: 122500 - DNA, 26 bp, Homo sapiens
ccacgagtcattcttagggttactct

SEQ ID NO: 122501 - DNA, 26 bp, Homo sapiens
cacgagtcattcttagggttactctt

SEQ ID NO: 122502 - DNA, 26 bp, Homo sapiens
acgagtcattcttagggttactcttt

SEQ ID NO: 122503 - DNA, 26 bp, Homo sapiens
cgagtcattcttagggttactctttt

SEQ ID NO: 122504 - DNA, 26 bp, Homo sapiens
gagtcattcttagggttactcttttc

SEQ ID NO: 122505 - DNA, 26 bp, Homo sapiens
agtcattcttagggttactcttttct

SEQ ID NO: 122506 - DNA, 26 bp, Homo sapiens
gtcattcttagggttactcttttcta

SEQ ID NO: 122507 - DNA, 26 bp, Homo sapiens
tcattcttagggttactcttttctac

SEQ ID NO: 122508 - DNA, 26 bp, Homo sapiens
cattcttagggttactcttttctaca

SEQ ID NO: 122509 - DNA, 26 bp, Homo sapiens
attcttagggttactcttttctacat

SEQ ID NO: 122510 - DNA, 26 bp, Homo sapiens
ttcttagggttactcttttctacatc

SEQ ID NO: 122511 - DNA, 26 bp, Homo sapiens
tcttagggttactcttttctacatcg

SEQ ID NO: 122512 - DNA, 26 bp, Homo sapiens
cttagggttactcttttctacatcgc

SEQ ID NO: 122513 - DNA, 26 bp, Homo sapiens
ttagggttactcttttctacatcgcc

SEQ ID NO: 122514 - DNA, 26 bp, Homo sapiens
tagggttactcttttctacatcgccc

SEQ ID NO: 122515 - DNA, 26 bp, Homo sapiens
agggttactcttttctacatcgccca

SEQ ID NO: 122516 - DNA, 26 bp, Homo sapiens
gggttactcttttctacatcgcccag

SEQ ID NO: 122517 - DNA, 26 bp, Homo sapiens
ggttactcttttctacatcgcccagg

SEQ ID NO: 122518 - DNA, 26 bp, Homo sapiens
gttactcttttctacatcgcccaggc

SEQ ID NO: 122519 - DNA, 26 bp, Homo sapiens
ttactcttttctacatcgcccaggcc

SEQ ID NO: 122520 - DNA, 26 bp, Homo sapiens
tactcttttctacatcgcccaggccc

SEQ ID NO: 122521 - DNA, 26 bp, Homo sapiens
actcttttctacatcgcccaggccct

SEQ ID NO: 122522 - DNA, 26 bp, Homo sapiens
ctcttttctacatcgcccaggccctc

SEQ ID NO: 122523 - DNA, 26 bp, Homo sapiens
tcttttctacatcgcccaggccctcg

SEQ ID NO: 122524 - DNA, 26 bp, Homo sapiens
cttttctacatcgcccaggccctcgg

SEQ ID NO: 122525 - DNA, 26 bp, Homo sapiens
ttttctacatcgcccaggccctcggt

SEQ ID NO: 122526 - DNA, 26 bp, Homo sapiens
tttctacatcgcccaggccctcggtg

SEQ ID NO: 122527 - DNA, 26 bp, Homo sapiens
ttctacatcgcccaggccctcggtgt

SEQ ID NO: 122528 - DNA, 26 bp, Homo sapiens
tctacatcgcccaggccctcggtgtc

SEQ ID NO: 122529 - DNA, 26 bp, Homo sapiens
ctacatcgcccaggccctcggtgtcc

SEQ ID NO: 122530 - DNA, 26 bp, Homo sapiens
tacatcgcccaggccctcggtgtcca

SEQ ID NO: 122531 - DNA, 26 bp, Homo sapiens
acatcgcccaggccctcggtgtccag

SEQ ID NO: 122532 - DNA, 26 bp, Homo sapiens
catcgcccaggccctcggtgtccaga

SEQ ID NO: 122533 - DNA, 26 bp, Homo sapiens
atcgcccaggccctcggtgtccagaa

SEQ ID NO: 122534 - DNA, 26 bp, Homo sapiens
tcgcccaggccctcggtgtccagaag

SEQ ID NO: 122535 - DNA, 26 bp, Homo sapiens
cgcccaggccctcggtgtccagaagg

SEQ ID NO: 122536 - DNA, 26 bp, Homo sapiens
gcccaggccctcggtgtccagaagga

SEQ ID NO: 122537 - DNA, 26 bp, Homo sapiens
cccaggccctcggtgtccagaaggac

SEQ ID NO: 122538 - DNA, 26 bp, Homo sapiens
ccaggccctcggtgtccagaaggacc

SEQ ID NO: 122539 - DNA, 26 bp, Homo sapiens
caggccctcggtgtccagaaggacca

SEQ ID NO: 122540 - DNA, 26 bp, Homo sapiens
aggccctcggtgtccagaaggaccag

SEQ ID NO: 122541 - DNA, 26 bp, Homo sapiens
ggccctcggtgtccagaaggaccagg

SEQ ID NO: 122542 - DNA, 26 bp, Homo sapiens
gccctcggtgtccagaaggaccaggg

SEQ ID NO: 122543 - DNA, 26 bp, Homo sapiens
ccctcggtgtccagaaggaccagggt

SEQ ID NO: 122544 - DNA, 26 bp, Homo sapiens
cctcggtgtccagaaggaccagggtg

SEQ ID NO: 122545 - DNA, 26 bp, Homo sapiens
ctcggtgtccagaaggaccagggtgt

SEQ ID NO: 122546 - DNA, 26 bp, Homo sapiens
tcggtgtccagaaggaccagggtgtg

SEQ ID NO: 122547 - DNA, 26 bp, Homo sapiens
cggtgtccagaaggaccagggtgtgg

SEQ ID NO: 122548 - DNA, 26 bp, Homo sapiens
ggtgtccagaaggaccagggtgtggt

SEQ ID NO: 122549 - DNA, 26 bp, Homo sapiens
gtgtccagaaggaccagggtgtggtt

SEQ ID NO: 122550 - DNA, 26 bp, Homo sapiens
tgtccagaaggaccagggtgtggttt

SEQ ID NO: 122551 - DNA, 26 bp, Homo sapiens
gtccagaaggaccagggtgtggtttg

SEQ ID NO: 122552 - DNA, 26 bp, Homo sapiens
tccagaaggaccagggtgtggtttgg

SEQ ID NO: 122553 - DNA, 26 bp, Homo sapiens
ccagaaggaccagggtgtggtttggc

SEQ ID NO: 122554 - DNA, 26 bp, Homo sapiens
cagaaggaccagggtgtggtttggct

SEQ ID NO: 122555 - DNA, 26 bp, Homo sapiens
agaaggaccagggtgtggtttggctt

SEQ ID NO: 122556 - DNA, 26 bp, Homo sapiens
gaaggaccagggtgtggtttggctta

SEQ ID NO: 122557 - DNA, 26 bp, Homo sapiens
aaggaccagggtgtggtttggcttag

SEQ ID NO: 122558 - DNA, 26 bp, Homo sapiens
aggaccagggtgtggtttggcttaga

SEQ ID NO: 122559 - DNA, 26 bp, Homo sapiens
ggaccagggtgtggtttggcttagag

SEQ ID NO: 122560 - DNA, 26 bp, Homo sapiens
gaccagggtgtggtttggcttagaga

SEQ ID NO: 122561 - DNA, 26 bp, Homo sapiens
accagggtgtggtttggcttagagag

SEQ ID NO: 122562 - DNA, 26 bp, Homo sapiens
ccagggtgtggtttggcttagagagg

SEQ ID NO: 122563 - DNA, 26 bp, Homo sapiens
cagggtgtggtttggcttagagaggt

SEQ ID NO: 122564 - DNA, 26 bp, Homo sapiens
agggtgtggtttggcttagagaggtg

SEQ ID NO: 122565 - DNA, 26 bp, Homo sapiens
gggtgtggtttggcttagagaggtgg

SEQ ID NO: 122566 - DNA, 26 bp, Homo sapiens
ggtgtggtttggcttagagaggtggg

SEQ ID NO: 122567 - DNA, 26 bp, Homo sapiens
gtgtggtttggcttagagaggtgggg

SEQ ID NO: 122568 - DNA, 26 bp, Homo sapiens
tgtggtttggcttagagaggtggggc

SEQ ID NO: 122569 - DNA, 26 bp, Homo sapiens
gtggtttggcttagagaggtggggca

SEQ ID NO: 122570 - DNA, 26 bp, Homo sapiens
tggtttggcttagagaggtggggcac

SEQ ID NO: 122571 - DNA, 26 bp, Homo sapiens
ggtttggcttagagaggtggggcaca

SEQ ID NO: 122572 - DNA, 26 bp, Homo sapiens
gtttggcttagagaggtggggcacac

SEQ ID NO: 122573 - DNA, 26 bp, Homo sapiens
tttggcttagagaggtggggcacaca

SEQ ID NO: 122574 - DNA, 26 bp, Homo sapiens
ttggcttagagaggtggggcacacac

SEQ ID NO: 122575 - DNA, 26 bp, Homo sapiens
tggcttagagaggtggggcacacacc

SEQ ID NO: 122576 - DNA, 26 bp, Homo sapiens
ggcttagagaggtggggcacacacca

SEQ ID NO: 122577 - DNA, 26 bp, Homo sapiens
gcttagagaggtggggcacacaccac

SEQ ID NO: 122578 - DNA, 26 bp, Homo sapiens
cttagagaggtggggcacacaccaca

SEQ ID NO: 122579 - DNA, 26 bp, Homo sapiens
ttagagaggtggggcacacaccacat

SEQ ID NO: 122580 - DNA, 26 bp, Homo sapiens
tagagaggtggggcacacaccacatc

SEQ ID NO: 122581 - DNA, 26 bp, Homo sapiens
agagaggtggggcacacaccacatcc

SEQ ID NO: 122582 - DNA, 26 bp, Homo sapiens
gagaggtggggcacacaccacatcca

SEQ ID NO: 122583 - DNA, 26 bp, Homo sapiens
agaggtggggcacacaccacatccag

SEQ ID NO: 122584 - DNA, 26 bp, Homo sapiens
gaggtggggcacacaccacatccaga

SEQ ID NO: 122585 - DNA, 26 bp, Homo sapiens
aggtggggcacacaccacatccagat

SEQ ID NO: 122586 - DNA, 26 bp, Homo sapiens
ggtggggcacacaccacatccagatg

SEQ ID NO: 122587 - DNA, 26 bp, Homo sapiens
gtggggcacacaccacatccagatgc

SEQ ID NO: 122588 - DNA, 26 bp, Homo sapiens
tggggcacacaccacatccagatgcc

SEQ ID NO: 122589 - DNA, 26 bp, Homo sapiens
ggggcacacaccacatccagatgccc

SEQ ID NO: 122590 - DNA, 26 bp, Homo sapiens
gggcacacaccacatccagatgccct

SEQ ID NO: 122591 - DNA, 26 bp, Homo sapiens
ggcacacaccacatccagatgccctt

SEQ ID NO: 122592 - DNA, 26 bp, Homo sapiens
gcacacaccacatccagatgccctta

SEQ ID NO: 122593 - DNA, 26 bp, Homo sapiens
cacacaccacatccagatgcccttag

SEQ ID NO: 122594 - DNA, 26 bp, Homo sapiens
acacaccacatccagatgcccttagt

SEQ ID NO: 122595 - DNA, 26 bp, Homo sapiens
cacaccacatccagatgcccttagtt

SEQ ID NO: 122596 - DNA, 26 bp, Homo sapiens
acaccacatccagatgcccttagttt

SEQ ID NO: 122597 - DNA, 26 bp, Homo sapiens
caccacatccagatgcccttagtttc

SEQ ID NO: 122598 - DNA, 26 bp, Homo sapiens
accacatccagatgcccttagtttca

SEQ ID NO: 122599 - DNA, 26 bp, Homo sapiens
ccacatccagatgcccttagtttcag

SEQ ID NO: 122600 - DNA, 26 bp, Homo sapiens
cacatccagatgcccttagtttcaga

SEQ ID NO: 122601 - DNA, 26 bp, Homo sapiens
acatccagatgcccttagtttcagac

SEQ ID NO: 122602 - DNA, 26 bp, Homo sapiens
catccagatgcccttagtttcagact

SEQ ID NO: 122603 - DNA, 26 bp, Homo sapiens
atccagatgcccttagtttcagactg

SEQ ID NO: 122604 - DNA, 26 bp, Homo sapiens
tccagatgcccttagtttcagactgc

SEQ ID NO: 122605 - DNA, 26 bp, Homo sapiens
ccagatgcccttagtttcagactgca

SEQ ID NO: 122606 - DNA, 26 bp, Homo sapiens
cagatgcccttagtttcagactgcac

SEQ ID NO: 122607 - DNA, 26 bp, Homo sapiens
agatgcccttagtttcagactgcacc

SEQ ID NO: 122608 - DNA, 26 bp, Homo sapiens
gatgcccttagtttcagactgcaccg

SEQ ID NO: 122609 - DNA, 26 bp, Homo sapiens
atgcccttagtttcagactgcaccgt

SEQ ID NO: 122610 - DNA, 26 bp, Homo sapiens
tgcccttagtttcagactgcaccgtg

SEQ ID NO: 122611 - DNA, 26 bp, Homo sapiens
gcccttagtttcagactgcaccgtgg

SEQ ID NO: 122612 - DNA, 26 bp, Homo sapiens
cccttagtttcagactgcaccgtgga

SEQ ID NO: 122613 - DNA, 26 bp, Homo sapiens
ccttagtttcagactgcaccgtggag

SEQ ID NO: 122614 - DNA, 26 bp, Homo sapiens
cttagtttcagactgcaccgtggagc

SEQ ID NO: 122615 - DNA, 26 bp, Homo sapiens
ttagtttcagactgcaccgtggagcc

SEQ ID NO: 122616 - DNA, 26 bp, Homo sapiens
tagtttcagactgcaccgtggagccc

SEQ ID NO: 122617 - DNA, 26 bp, Homo sapiens
agtttcagactgcaccgtggagccca

SEQ ID NO: 122618 - DNA, 26 bp, Homo sapiens
gtttcagactgcaccgtggagcccag

SEQ ID NO: 122619 - DNA, 26 bp, Homo sapiens
tttcagactgcaccgtggagcccaga

SEQ ID NO: 122620 - DNA, 26 bp, Homo sapiens
ttcagactgcaccgtggagcccagag

SEQ ID NO: 122621 - DNA, 26 bp, Homo sapiens
tcagactgcaccgtggagcccagagg

SEQ ID NO: 122622 - DNA, 26 bp, Homo sapiens
cagactgcaccgtggagcccagaggg

SEQ ID NO: 122623 - DNA, 26 bp, Homo sapiens
agactgcaccgtggagcccagaggga

SEQ ID NO: 122624 - DNA, 26 bp, Homo sapiens
gactgcaccgtggagcccagagggaa

SEQ ID NO: 122625 - DNA, 26 bp, Homo sapiens
actgcaccgtggagcccagagggaag

SEQ ID NO: 122626 - DNA, 26 bp, Homo sapiens
ctgcaccgtggagcccagagggaagc

SEQ ID NO: 122627 - DNA, 26 bp, Homo sapiens
tgcaccgtggagcccagagggaagcc

SEQ ID NO: 122628 - DNA, 26 bp, Homo sapiens
gcaccgtggagcccagagggaagcca

SEQ ID NO: 122629 - DNA, 26 bp, Homo sapiens
caccgtggagcccagagggaagccat

SEQ ID NO: 122630 - DNA, 26 bp, Homo sapiens
accgtggagcccagagggaagccatt

SEQ ID NO: 122631 - DNA, 26 bp, Homo sapiens
ccgtggagcccagagggaagccattg

SEQ ID NO: 122632 - DNA, 26 bp, Homo sapiens
cgtggagcccagagggaagccattgc

SEQ ID NO: 122633 - DNA, 26 bp, Homo sapiens
gtggagcccagagggaagccattgcg

SEQ ID NO: 122634 - DNA, 26 bp, Homo sapiens
tggagcccagagggaagccattgcgc

SEQ ID NO: 122635 - DNA, 26 bp, Homo sapiens
ggagcccagagggaagccattgcgct

SEQ ID NO: 122636 - DNA, 26 bp, Homo sapiens
gagcccagagggaagccattgcgctt

SEQ ID NO: 122637 - DNA, 26 bp, Homo sapiens
agcccagagggaagccattgcgcttt

SEQ ID NO: 122638 - DNA, 26 bp, Homo sapiens
gcccagagggaagccattgcgctttc

SEQ ID NO: 122639 - DNA, 26 bp, Homo sapiens
cccagagggaagccattgcgctttcc

SEQ ID NO: 122640 - DNA, 26 bp, Homo sapiens
ccagagggaagccattgcgctttcct

SEQ ID NO: 122641 - DNA, 26 bp, Homo sapiens
cagagggaagccattgcgctttcctg

SEQ ID NO: 122642 - DNA, 26 bp, Homo sapiens
agagggaagccattgcgctttcctgc

SEQ ID NO: 122643 - DNA, 26 bp, Homo sapiens
gagggaagccattgcgctttcctgca

SEQ ID NO: 122644 - DNA, 26 bp, Homo sapiens
agggaagccattgcgctttcctgcaa

SEQ ID NO: 122645 - DNA, 26 bp, Homo sapiens
gggaagccattgcgctttcctgcaag

SEQ ID NO: 122646 - DNA, 26 bp, Homo sapiens
ggaagccattgcgctttcctgcaaga

SEQ ID NO: 122647 - DNA, 26 bp, Homo sapiens
gaagccattgcgctttcctgcaagac

SEQ ID NO: 122648 - DNA, 26 bp, Homo sapiens
aagccattgcgctttcctgcaagacg

SEQ ID NO: 122649 - DNA, 26 bp, Homo sapiens
agccattgcgctttcctgcaagacga

SEQ ID NO: 122650 - DNA, 26 bp, Homo sapiens
gccattgcgctttcctgcaagacgat

SEQ ID NO: 122651 - DNA, 26 bp, Homo sapiens
ccattgcgctttcctgcaagacgatt

SEQ ID NO: 122652 - DNA, 26 bp, Homo sapiens
cattgcgctttcctgcaagacgattc

SEQ ID NO: 122653 - DNA, 26 bp, Homo sapiens
attgcgctttcctgcaagacgattca

SEQ ID NO: 122654 - DNA, 26 bp, Homo sapiens
ttgcgctttcctgcaagacgattcat

SEQ ID NO: 122655 - DNA, 26 bp, Homo sapiens
tgcgctttcctgcaagacgattcatg

SEQ ID NO: 122656 - DNA, 26 bp, Homo sapiens
gcgctttcctgcaagacgattcatga

SEQ ID NO: 122657 - DNA, 26 bp, Homo sapiens
cgctttcctgcaagacgattcatgag

SEQ ID NO: 122658 - DNA, 26 bp, Homo sapiens
gctttcctgcaagacgattcatgaga

SEQ ID NO: 122659 - DNA, 26 bp, Homo sapiens
ctttcctgcaagacgattcatgagat

SEQ ID NO: 122660 - DNA, 26 bp, Homo sapiens
tttcctgcaagacgattcatgagata

SEQ ID NO: 122661 - DNA, 26 bp, Homo sapiens
ttcctgcaagacgattcatgagatag

SEQ ID NO: 122662 - DNA, 26 bp, Homo sapiens
tcctgcaagacgattcatgagatagg

SEQ ID NO: 122663 - DNA, 26 bp, Homo sapiens
cctgcaagacgattcatgagatagga

SEQ ID NO: 122664 - DNA, 26 bp, Homo sapiens
ctgcaagacgattcatgagataggat

SEQ ID NO: 122665 - DNA, 26 bp, Homo sapiens
tgcaagacgattcatgagataggatt

SEQ ID NO: 122666 - DNA, 26 bp, Homo sapiens
gcaagacgattcatgagataggattt

SEQ ID NO: 122667 - DNA, 26 bp, Homo sapiens
caagacgattcatgagataggatttt

SEQ ID NO: 122668 - DNA, 26 bp, Homo sapiens
aagacgattcatgagataggattttc

SEQ ID NO: 122669 - DNA, 26 bp, Homo sapiens
agacgattcatgagataggattttcc

SEQ ID NO: 122670 - DNA, 26 bp, Homo sapiens
gacgattcatgagataggattttcct

SEQ ID NO: 122671 - DNA, 26 bp, Homo sapiens
acgattcatgagataggattttcctg

SEQ ID NO: 122672 - DNA, 26 bp, Homo sapiens
cgattcatgagataggattttcctgt

SEQ ID NO: 122673 - DNA, 26 bp, Homo sapiens
gattcatgagataggattttcctgtg

SEQ ID NO: 122674 - DNA, 26 bp, Homo sapiens
attcatgagataggattttcctgtgc

SEQ ID NO: 122675 - DNA, 26 bp, Homo sapiens
ttcatgagataggattttcctgtgcg

SEQ ID NO: 122676 - DNA, 26 bp, Homo sapiens
tcatgagataggattttcctgtgcgg

SEQ ID NO: 122677 - DNA, 26 bp, Homo sapiens
catgagataggattttcctgtgcggt

SEQ ID NO: 122678 - DNA, 26 bp, Homo sapiens
atgagataggattttcctgtgcggta

SEQ ID NO: 122679 - DNA, 26 bp, Homo sapiens
tgagataggattttcctgtgcggtat

SEQ ID NO: 122680 - DNA, 26 bp, Homo sapiens
gagataggattttcctgtgcggtata

SEQ ID NO: 122681 - DNA, 26 bp, Homo sapiens
agataggattttcctgtgcggtatag

SEQ ID NO: 122682 - DNA, 26 bp, Homo sapiens
gataggattttcctgtgcggtatagc

SEQ ID NO: 122683 - DNA, 26 bp, Homo sapiens
ataggattttcctgtgcggtatagcc

SEQ ID NO: 122684 - DNA, 26 bp, Homo sapiens
taggattttcctgtgcggtatagccc

SEQ ID NO: 122685 - DNA, 26 bp, Homo sapiens
aggattttcctgtgcggtatagccct

SEQ ID NO: 122686 - DNA, 26 bp, Homo sapiens
ggattttcctgtgcggtatagcccta

SEQ ID NO: 122687 - DNA, 26 bp, Homo sapiens
gattttcctgtgcggtatagccctac

SEQ ID NO: 122688 - DNA, 26 bp, Homo sapiens
attttcctgtgcggtatagccctaca

SEQ ID NO: 122689 - DNA, 26 bp, Homo sapiens
ttttcctgtgcggtatagccctacaa

SEQ ID NO: 122690 - DNA, 26 bp, Homo sapiens
tttcctgtgcggtatagccctacaat

SEQ ID NO: 122691 - DNA, 26 bp, Homo sapiens
ttcctgtgcggtatagccctacaatg

SEQ ID NO: 122692 - DNA, 26 bp, Homo sapiens
tcctgtgcggtatagccctacaatgg

SEQ ID NO: 122693 - DNA, 26 bp, Homo sapiens
cctgtgcggtatagccctacaatggc

SEQ ID NO: 122694 - DNA, 26 bp, Homo sapiens
ctgtgcggtatagccctacaatggcc

SEQ ID NO: 122695 - DNA, 26 bp, Homo sapiens
tgtgcggtatagccctacaatggcca

SEQ ID NO: 122696 - DNA, 26 bp, Homo sapiens
gtgcggtatagccctacaatggccac

SEQ ID NO: 122697 - DNA, 26 bp, Homo sapiens
tgcggtatagccctacaatggccacc

SEQ ID NO: 122698 - DNA, 26 bp, Homo sapiens
gcggtatagccctacaatggccacca

SEQ ID NO: 122699 - DNA, 26 bp, Homo sapiens
cggtatagccctacaatggccaccac

SEQ ID NO: 122700 - DNA, 26 bp, Homo sapiens
ggtatagccctacaatggccaccacc

SEQ ID NO: 122701 - DNA, 26 bp, Homo sapiens
gtatagccctacaatggccaccacca

SEQ ID NO: 122702 - DNA, 26 bp, Homo sapiens
tatagccctacaatggccaccaccac

SEQ ID NO: 122703 - DNA, 26 bp, Homo sapiens
atagccctacaatggccaccaccacc

SEQ ID NO: 122704 - DNA, 26 bp, Homo sapiens
tagccctacaatggccaccaccacca

SEQ ID NO: 122705 - DNA, 26 bp, Homo sapiens
agccctacaatggccaccaccaccac

SEQ ID NO: 122706 - DNA, 26 bp, Homo sapiens
gccctacaatggccaccaccaccacg

SEQ ID NO: 122707 - DNA, 26 bp, Homo sapiens
ccctacaatggccaccaccaccacgg

SEQ ID NO: 122708 - DNA, 26 bp, Homo sapiens
cctacaatggccaccaccaccacggg

SEQ ID NO: 122709 - DNA, 26 bp, Homo sapiens
ctacaatggccaccaccaccacgggc

SEQ ID NO: 122710 - DNA, 26 bp, Homo sapiens
tacaatggccaccaccaccacgggct

SEQ ID NO: 122711 - DNA, 26 bp, Homo sapiens
acaatggccaccaccaccacgggctg

SEQ ID NO: 122712 - DNA, 26 bp, Homo sapiens
caatggccaccaccaccacgggctga

SEQ ID NO: 122713 - DNA, 26 bp, Homo sapiens
aatggccaccaccaccacgggctgag

SEQ ID NO: 122714 - DNA, 26 bp, Homo sapiens
atggccaccaccaccacgggctgaga

SEQ ID NO: 122715 - DNA, 26 bp, Homo sapiens
tggccaccaccaccacgggctgagaa

SEQ ID NO: 122716 - DNA, 26 bp, Homo sapiens
ggccaccaccaccacgggctgagaaa

SEQ ID NO: 122717 - DNA, 26 bp, Homo sapiens
gccaccaccaccacgggctgagaaat

SEQ ID NO: 122718 - DNA, 26 bp, Homo sapiens
ccaccaccaccacgggctgagaaatc

SEQ ID NO: 122719 - DNA, 26 bp, Homo sapiens
caccaccaccacgggctgagaaatct

SEQ ID NO: 122720 - DNA, 26 bp, Homo sapiens
accaccaccacgggctgagaaatctt

SEQ ID NO: 122721 - DNA, 26 bp, Homo sapiens
ccaccaccacgggctgagaaatcttg

SEQ ID NO: 122722 - DNA, 26 bp, Homo sapiens
caccaccacgggctgagaaatcttgt

SEQ ID NO: 122723 - DNA, 26 bp, Homo sapiens
accaccacgggctgagaaatcttgtc

SEQ ID NO: 122724 - DNA, 26 bp, Homo sapiens
ccaccacgggctgagaaatcttgtca

SEQ ID NO: 122725 - DNA, 26 bp, Homo sapiens
caccacgggctgagaaatcttgtcaa

SEQ ID NO: 122726 - DNA, 26 bp, Homo sapiens
accacgggctgagaaatcttgtcaag

SEQ ID NO: 122727 - DNA, 26 bp, Homo sapiens
ccacgggctgagaaatcttgtcaaga

SEQ ID NO: 122728 - DNA, 26 bp, Homo sapiens
cacgggctgagaaatcttgtcaagaa

SEQ ID NO: 122729 - DNA, 26 bp, Homo sapiens
acgggctgagaaatcttgtcaagaat

SEQ ID NO: 122730 - DNA, 26 bp, Homo sapiens
cgggctgagaaatcttgtcaagaatc

SEQ ID NO: 122731 - DNA, 26 bp, Homo sapiens
gggctgagaaatcttgtcaagaatct

SEQ ID NO: 122732 - DNA, 26 bp, Homo sapiens
ggctgagaaatcttgtcaagaatctc

SEQ ID NO: 122733 - DNA, 26 bp, Homo sapiens
gctgagaaatcttgtcaagaatctct

SEQ ID NO: 122734 - DNA, 26 bp, Homo sapiens
ctgagaaatcttgtcaagaatctcta

SEQ ID NO: 122735 - DNA, 26 bp, Homo sapiens
tgagaaatcttgtcaagaatctctaa

SEQ ID NO: 122736 - DNA, 26 bp, Homo sapiens
gagaaatcttgtcaagaatctctaat

SEQ ID NO: 122737 - DNA, 26 bp, Homo sapiens
agaaatcttgtcaagaatctctaatg

SEQ ID NO: 122738 - DNA, 26 bp, Homo sapiens
gaaatcttgtcaagaatctctaatgc

SEQ ID NO: 122739 - DNA, 26 bp, Homo sapiens
aaatcttgtcaagaatctctaatgcc

SEQ ID NO: 122740 - DNA, 26 bp, Homo sapiens
aatcttgtcaagaatctctaatgcct

SEQ ID NO: 122741 - DNA, 26 bp, Homo sapiens
atcttgtcaagaatctctaatgcctt

SEQ ID NO: 122742 - DNA, 26 bp, Homo sapiens
tcttgtcaagaatctctaatgccttt

SEQ ID NO: 122743 - DNA, 26 bp, Homo sapiens
cttgtcaagaatctctaatgcctttg

SEQ ID NO: 122744 - DNA, 26 bp, Homo sapiens
ttgtcaagaatctctaatgcctttga

SEQ ID NO: 122745 - DNA, 26 bp, Homo sapiens
tgtcaagaatctctaatgcctttgaa

SEQ ID NO: 122746 - DNA, 26 bp, Homo sapiens
gtcaagaatctctaatgcctttgaat

SEQ ID NO: 122747 - DNA, 26 bp, Homo sapiens
tcaagaatctctaatgcctttgaatt

SEQ ID NO: 122748 - DNA, 26 bp, Homo sapiens
caagaatctctaatgcctttgaattc

SEQ ID NO: 122749 - DNA, 26 bp, Homo sapiens
aagaatctctaatgcctttgaattca

SEQ ID NO: 122750 - DNA, 26 bp, Homo sapiens
agaatctctaatgcctttgaattcac

SEQ ID NO: 122751 - DNA, 26 bp, Homo sapiens
gaatctctaatgcctttgaattcact

SEQ ID NO: 122752 - DNA, 26 bp, Homo sapiens
aatctctaatgcctttgaattcactg

SEQ ID NO: 122753 - DNA, 26 bp, Homo sapiens
atctctaatgcctttgaattcactgt

SEQ ID NO: 122754 - DNA, 26 bp, Homo sapiens
tctctaatgcctttgaattcactgtc

SEQ ID NO: 122755 - DNA, 26 bp, Homo sapiens
ctctaatgcctttgaattcactgtca

SEQ ID NO: 122756 - DNA, 26 bp, Homo sapiens
tctaatgcctttgaattcactgtcag

SEQ ID NO: 122757 - DNA, 26 bp, Homo sapiens
ctaatgcctttgaattcactgtcagc

SEQ ID NO: 122758 - DNA, 26 bp, Homo sapiens
taatgcctttgaattcactgtcagct

SEQ ID NO: 122759 - DNA, 26 bp, Homo sapiens
aatgcctttgaattcactgtcagctg

SEQ ID NO: 122760 - DNA, 26 bp, Homo sapiens
atgcctttgaattcactgtcagctgc

SEQ ID NO: 122761 - DNA, 26 bp, Homo sapiens
tgcctttgaattcactgtcagctgct

SEQ ID NO: 122762 - DNA, 26 bp, Homo sapiens
gcctttgaattcactgtcagctgctc

SEQ ID NO: 122763 - DNA, 26 bp, Homo sapiens
cctttgaattcactgtcagctgctct

SEQ ID NO: 122764 - DNA, 26 bp, Homo sapiens
ctttgaattcactgtcagctgctctt

SEQ ID NO: 122765 - DNA, 26 bp, Homo sapiens
tttgaattcactgtcagctgctcttc

SEQ ID NO: 122766 - DNA, 26 bp, Homo sapiens
ttgaattcactgtcagctgctcttcc

SEQ ID NO: 122767 - DNA, 26 bp, Homo sapiens
tgaattcactgtcagctgctcttcct

SEQ ID NO: 122768 - DNA, 26 bp, Homo sapiens
gaattcactgtcagctgctcttcctg

SEQ ID NO: 122769 - DNA, 26 bp, Homo sapiens
aattcactgtcagctgctcttcctgg

SEQ ID NO: 122770 - DNA, 26 bp, Homo sapiens
attcactgtcagctgctcttcctggt

SEQ ID NO: 122771 - DNA, 26 bp, Homo sapiens
ttcactgtcagctgctcttcctggtt

SEQ ID NO: 122772 - DNA, 26 bp, Homo sapiens
tcactgtcagctgctcttcctggttt

SEQ ID NO: 122773 - DNA, 26 bp, Homo sapiens
cactgtcagctgctcttcctggtttt

SEQ ID NO: 122774 - DNA, 26 bp, Homo sapiens
actgtcagctgctcttcctggttttc

SEQ ID NO: 122775 - DNA, 26 bp, Homo sapiens
ctgtcagctgctcttcctggttttcc

SEQ ID NO: 122776 - DNA, 26 bp, Homo sapiens
tgtcagctgctcttcctggttttcca

SEQ ID NO: 122777 - DNA, 26 bp, Homo sapiens
gtcagctgctcttcctggttttccac

SEQ ID NO: 122778 - DNA, 26 bp, Homo sapiens
tcagctgctcttcctggttttccact

SEQ ID NO: 122779 - DNA, 26 bp, Homo sapiens
cagctgctcttcctggttttccacta

SEQ ID NO: 122780 - DNA, 26 bp, Homo sapiens
agctgctcttcctggttttccactag

SEQ ID NO: 122781 - DNA, 26 bp, Homo sapiens
gctgctcttcctggttttccactaga

SEQ ID NO: 122782 - DNA, 26 bp, Homo sapiens
ctgctcttcctggttttccactagac

SEQ ID NO: 122783 - DNA, 26 bp, Homo sapiens
tgctcttcctggttttccactagaca

SEQ ID NO: 122784 - DNA, 26 bp, Homo sapiens
gctcttcctggttttccactagacaa

SEQ ID NO: 122785 - DNA, 26 bp, Homo sapiens
ctcttcctggttttccactagacaaa

SEQ ID NO: 122786 - DNA, 26 bp, Homo sapiens
tcttcctggttttccactagacaaat

SEQ ID NO: 122787 - DNA, 26 bp, Homo sapiens
cttcctggttttccactagacaaatg

SEQ ID NO: 122788 - DNA, 26 bp, Homo sapiens
ttcctggttttccactagacaaatgg

SEQ ID NO: 122789 - DNA, 26 bp, Homo sapiens
tcctggttttccactagacaaatggg

SEQ ID NO: 122790 - DNA, 26 bp, Homo sapiens
cctggttttccactagacaaatgggg

SEQ ID NO: 122791 - DNA, 26 bp, Homo sapiens
ctggttttccactagacaaatggggg

SEQ ID NO: 122792 - DNA, 26 bp, Homo sapiens
tggttttccactagacaaatgggggc

SEQ ID NO: 122793 - DNA, 26 bp, Homo sapiens
ggttttccactagacaaatgggggcc

SEQ ID NO: 122794 - DNA, 26 bp, Homo sapiens
gttttccactagacaaatgggggcca

SEQ ID NO: 122795 - DNA, 26 bp, Homo sapiens
ttttccactagacaaatgggggccat

SEQ ID NO: 122796 - DNA, 26 bp, Homo sapiens
tttccactagacaaatgggggccatc

SEQ ID NO: 122797 - DNA, 26 bp, Homo sapiens
ttccactagacaaatgggggccatca

SEQ ID NO: 122798 - DNA, 26 bp, Homo sapiens
tccactagacaaatgggggccatcat

SEQ ID NO: 122799 - DNA, 26 bp, Homo sapiens
ccactagacaaatgggggccatcatg

SEQ ID NO: 122800 - DNA, 26 bp, Homo sapiens
cactagacaaatgggggccatcatga

SEQ ID NO: 122801 - DNA, 26 bp, Homo sapiens
actagacaaatgggggccatcatgat

SEQ ID NO: 122802 - DNA, 26 bp, Homo sapiens
ctagacaaatgggggccatcatgatg

SEQ ID NO: 122803 - DNA, 26 bp, Homo sapiens
tagacaaatgggggccatcatgatgg

SEQ ID NO: 122804 - DNA, 26 bp, Homo sapiens
agacaaatgggggccatcatgatgga

SEQ ID NO: 122805 - DNA, 26 bp, Homo sapiens
gacaaatgggggccatcatgatggat

SEQ ID NO: 122806 - DNA, 26 bp, Homo sapiens
acaaatgggggccatcatgatggatt

SEQ ID NO: 122807 - DNA, 26 bp, Homo sapiens
caaatgggggccatcatgatggattc

SEQ ID NO: 122808 - DNA, 26 bp, Homo sapiens
aaatgggggccatcatgatggattca

SEQ ID NO: 122809 - DNA, 26 bp, Homo sapiens
aatgggggccatcatgatggattcag

SEQ ID NO: 122810 - DNA, 26 bp, Homo sapiens
atgggggccatcatgatggattcaga

SEQ ID NO: 122811 - DNA, 26 bp, Homo sapiens
tgggggccatcatgatggattcagat

SEQ ID NO: 122812 - DNA, 26 bp, Homo sapiens
gggggccatcatgatggattcagatt

SEQ ID NO: 122813 - DNA, 26 bp, Homo sapiens
ggggccatcatgatggattcagattc

SEQ ID NO: 122814 - DNA, 26 bp, Homo sapiens
gggccatcatgatggattcagattct

SEQ ID NO: 122815 - DNA, 26 bp, Homo sapiens
ggccatcatgatggattcagattctg

SEQ ID NO: 122816 - DNA, 26 bp, Homo sapiens
gccatcatgatggattcagattctgg

SEQ ID NO: 122817 - DNA, 26 bp, Homo sapiens
ccatcatgatggattcagattctgga

SEQ ID NO: 122818 - DNA, 26 bp, Homo sapiens
catcatgatggattcagattctggat

SEQ ID NO: 122819 - DNA, 26 bp, Homo sapiens
atcatgatggattcagattctggata

SEQ ID NO: 122820 - DNA, 26 bp, Homo sapiens
tcatgatggattcagattctggataa

SEQ ID NO: 122821 - DNA, 26 bp, Homo sapiens
catgatggattcagattctggataac

SEQ ID NO: 122822 - DNA, 26 bp, Homo sapiens
atgatggattcagattctggataacc

SEQ ID NO: 122823 - DNA, 26 bp, Homo sapiens
tgatggattcagattctggataacct

SEQ ID NO: 122824 - DNA, 26 bp, Homo sapiens
gatggattcagattctggataacctg

SEQ ID NO: 122825 - DNA, 26 bp, Homo sapiens
atggattcagattctggataacctgg

SEQ ID NO: 122826 - DNA, 26 bp, Homo sapiens
tggattcagattctggataacctggt

SEQ ID NO: 122827 - DNA, 26 bp, Homo sapiens
ggattcagattctggataacctggtg

SEQ ID NO: 122828 - DNA, 26 bp, Homo sapiens
gattcagattctggataacctggtgt

SEQ ID NO: 122829 - DNA, 26 bp, Homo sapiens
attcagattctggataacctggtgtg

SEQ ID NO: 122830 - DNA, 26 bp, Homo sapiens
ttcagattctggataacctggtgtgg

SEQ ID NO: 122831 - DNA, 26 bp, Homo sapiens
tcagattctggataacctggtgtggg

SEQ ID NO: 122832 - DNA, 26 bp, Homo sapiens
cagattctggataacctggtgtgggc

SEQ ID NO: 122833 - DNA, 26 bp, Homo sapiens
agattctggataacctggtgtgggca

SEQ ID NO: 122834 - DNA, 26 bp, Homo sapiens
gattctggataacctggtgtgggcac

SEQ ID NO: 122835 - DNA, 26 bp, Homo sapiens
attctggataacctggtgtgggcact

SEQ ID NO: 122836 - DNA, 26 bp, Homo sapiens
ttctggataacctggtgtgggcactg

SEQ ID NO: 122837 - DNA, 26 bp, Homo sapiens
tctggataacctggtgtgggcactgc

SEQ ID NO: 122838 - DNA, 26 bp, Homo sapiens
ctggataacctggtgtgggcactgca

SEQ ID NO: 122839 - DNA, 26 bp, Homo sapiens
tggataacctggtgtgggcactgcag

SEQ ID NO: 122840 - DNA, 26 bp, Homo sapiens
ggataacctggtgtgggcactgcagc

SEQ ID NO: 122841 - DNA, 26 bp, Homo sapiens
gataacctggtgtgggcactgcagcg

SEQ ID NO: 122842 - DNA, 26 bp, Homo sapiens
ataacctggtgtgggcactgcagcgt

SEQ ID NO: 122843 - DNA, 26 bp, Homo sapiens
taacctggtgtgggcactgcagcgtg

SEQ ID NO: 122844 - DNA, 26 bp, Homo sapiens
aacctggtgtgggcactgcagcgtga

SEQ ID NO: 122845 - DNA, 26 bp, Homo sapiens
acctggtgtgggcactgcagcgtgaa

SEQ ID NO: 122846 - DNA, 26 bp, Homo sapiens
cctggtgtgggcactgcagcgtgaag

SEQ ID NO: 122847 - DNA, 26 bp, Homo sapiens
ctggtgtgggcactgcagcgtgaaga

SEQ ID NO: 122848 - DNA, 26 bp, Homo sapiens
tggtgtgggcactgcagcgtgaagag

SEQ ID NO: 122849 - DNA, 26 bp, Homo sapiens
ggtgtgggcactgcagcgtgaagagt

SEQ ID NO: 122850 - DNA, 26 bp, Homo sapiens
gtgtgggcactgcagcgtgaagagtt

SEQ ID NO: 122851 - DNA, 26 bp, Homo sapiens
tgtgggcactgcagcgtgaagagttc

SEQ ID NO: 122852 - DNA, 26 bp, Homo sapiens
gtgggcactgcagcgtgaagagttct

SEQ ID NO: 122853 - DNA, 26 bp, Homo sapiens
tgggcactgcagcgtgaagagttctc

SEQ ID NO: 122854 - DNA, 26 bp, Homo sapiens
gggcactgcagcgtgaagagttctct

SEQ ID NO: 122855 - DNA, 26 bp, Homo sapiens
ggcactgcagcgtgaagagttctctc

SEQ ID NO: 122856 - DNA, 26 bp, Homo sapiens
gcactgcagcgtgaagagttctctca

SEQ ID NO: 122857 - DNA, 26 bp, Homo sapiens
cactgcagcgtgaagagttctctcac

SEQ ID NO: 122858 - DNA, 26 bp, Homo sapiens
actgcagcgtgaagagttctctcacc

SEQ ID NO: 122859 - DNA, 26 bp, Homo sapiens
ctgcagcgtgaagagttctctcaccc

SEQ ID NO: 122860 - DNA, 26 bp, Homo sapiens
tgcagcgtgaagagttctctcaccca

SEQ ID NO: 122861 - DNA, 26 bp, Homo sapiens
gcagcgtgaagagttctctcacccat

SEQ ID NO: 122862 - DNA, 26 bp, Homo sapiens
cagcgtgaagagttctctcacccatt

SEQ ID NO: 122863 - DNA, 26 bp, Homo sapiens
agcgtgaagagttctctcacccattg

SEQ ID NO: 122864 - DNA, 26 bp, Homo sapiens
gcgtgaagagttctctcacccattgc

SEQ ID NO: 122865 - DNA, 26 bp, Homo sapiens
cgtgaagagttctctcacccattgct

SEQ ID NO: 122866 - DNA, 26 bp, Homo sapiens
gtgaagagttctctcacccattgctc

SEQ ID NO: 122867 - DNA, 26 bp, Homo sapiens
tgaagagttctctcacccattgctct

SEQ ID NO: 122868 - DNA, 26 bp, Homo sapiens
gaagagttctctcacccattgctctg

SEQ ID NO: 122869 - DNA, 26 bp, Homo sapiens
aagagttctctcacccattgctctgt

SEQ ID NO: 122870 - DNA, 26 bp, Homo sapiens
agagttctctcacccattgctctgtc

SEQ ID NO: 122871 - DNA, 26 bp, Homo sapiens
gagttctctcacccattgctctgtcc

SEQ ID NO: 122872 - DNA, 26 bp, Homo sapiens
agttctctcacccattgctctgtcct

SEQ ID NO: 122873 - DNA, 26 bp, Homo sapiens
gttctctcacccattgctctgtcctc

SEQ ID NO: 122874 - DNA, 26 bp, Homo sapiens
ttctctcacccattgctctgtcctcc

SEQ ID NO: 122875 - DNA, 26 bp, Homo sapiens
tctctcacccattgctctgtcctcct

SEQ ID NO: 122876 - DNA, 26 bp, Homo sapiens
ctctcacccattgctctgtcctcctg

SEQ ID NO: 122877 - DNA, 26 bp, Homo sapiens
tctcacccattgctctgtcctcctgc

SEQ ID NO: 122878 - DNA, 26 bp, Homo sapiens
ctcacccattgctctgtcctcctgcg

SEQ ID NO: 122879 - DNA, 26 bp, Homo sapiens
tcacccattgctctgtcctcctgcgc

SEQ ID NO: 122880 - DNA, 26 bp, Homo sapiens
cacccattgctctgtcctcctgcgcc

SEQ ID NO: 122881 - DNA, 26 bp, Homo sapiens
acccattgctctgtcctcctgcgcct

SEQ ID NO: 122882 - DNA, 26 bp, Homo sapiens
cccattgctctgtcctcctgcgcctg

SEQ ID NO: 122883 - DNA, 26 bp, Homo sapiens
ccattgctctgtcctcctgcgcctgg

SEQ ID NO: 122884 - DNA, 26 bp, Homo sapiens
cattgctctgtcctcctgcgcctgga

SEQ ID NO: 122885 - DNA, 26 bp, Homo sapiens
attgctctgtcctcctgcgcctggat

SEQ ID NO: 122886 - DNA, 26 bp, Homo sapiens
ttgctctgtcctcctgcgcctggatc

SEQ ID NO: 122887 - DNA, 26 bp, Homo sapiens
tgctctgtcctcctgcgcctggatcc

SEQ ID NO: 122888 - DNA, 26 bp, Homo sapiens
gctctgtcctcctgcgcctggatcct

SEQ ID NO: 122889 - DNA, 26 bp, Homo sapiens
ctctgtcctcctgcgcctggatcctc

SEQ ID NO: 122890 - DNA, 26 bp, Homo sapiens
tctgtcctcctgcgcctggatcctcg

SEQ ID NO: 122891 - DNA, 26 bp, Homo sapiens
ctgtcctcctgcgcctggatcctcga

SEQ ID NO: 122892 - DNA, 26 bp, Homo sapiens
tgtcctcctgcgcctggatcctcgag

SEQ ID NO: 122893 - DNA, 26 bp, Homo sapiens
gtcctcctgcgcctggatcctcgaga

SEQ ID NO: 122894 - DNA, 26 bp, Homo sapiens
tcctcctgcgcctggatcctcgagaa

SEQ ID NO: 122895 - DNA, 26 bp, Homo sapiens
cctcctgcgcctggatcctcgagaaa

SEQ ID NO: 122896 - DNA, 26 bp, Homo sapiens
ctcctgcgcctggatcctcgagaaac

SEQ ID NO: 122897 - DNA, 26 bp, Homo sapiens
tcctgcgcctggatcctcgagaaacg

SEQ ID NO: 122898 - DNA, 26 bp, Homo sapiens
cctgcgcctggatcctcgagaaacgg

SEQ ID NO: 122899 - DNA, 26 bp, Homo sapiens
ctgcgcctggatcctcgagaaacgga

SEQ ID NO: 122900 - DNA, 26 bp, Homo sapiens
tgcgcctggatcctcgagaaacggac

SEQ ID NO: 122901 - DNA, 26 bp, Homo sapiens
gcgcctggatcctcgagaaacggact

SEQ ID NO: 122902 - DNA, 26 bp, Homo sapiens
cgcctggatcctcgagaaacggactg

SEQ ID NO: 122903 - DNA, 26 bp, Homo sapiens
gcctggatcctcgagaaacggactgt

SEQ ID NO: 122904 - DNA, 26 bp, Homo sapiens
cctggatcctcgagaaacggactgtt

SEQ ID NO: 122905 - DNA, 26 bp, Homo sapiens
ctggatcctcgagaaacggactgttc

SEQ ID NO: 122906 - DNA, 26 bp, Homo sapiens
tggatcctcgagaaacggactgttct

SEQ ID NO: 122907 - DNA, 26 bp, Homo sapiens
ggatcctcgagaaacggactgttctt

SEQ ID NO: 122908 - DNA, 26 bp, Homo sapiens
gatcctcgagaaacggactgttctta

SEQ ID NO: 122909 - DNA, 26 bp, Homo sapiens
atcctcgagaaacggactgttcttag

SEQ ID NO: 122910 - DNA, 26 bp, Homo sapiens
tcctcgagaaacggactgttcttaga

SEQ ID NO: 122911 - DNA, 26 bp, Homo sapiens
cctcgagaaacggactgttcttagaa

SEQ ID NO: 122912 - DNA, 26 bp, Homo sapiens
ctcgagaaacggactgttcttagaag

SEQ ID NO: 122913 - DNA, 26 bp, Homo sapiens
tcgagaaacggactgttcttagaagc

SEQ ID NO: 122914 - DNA, 26 bp, Homo sapiens
cgagaaacggactgttcttagaagct

SEQ ID NO: 122915 - DNA, 26 bp, Homo sapiens
gagaaacggactgttcttagaagctg

SEQ ID NO: 122916 - DNA, 26 bp, Homo sapiens
agaaacggactgttcttagaagctga

SEQ ID NO: 122917 - DNA, 26 bp, Homo sapiens
gaaacggactgttcttagaagctgaa

SEQ ID NO: 122918 - DNA, 26 bp, Homo sapiens
aaacggactgttcttagaagctgaaa

SEQ ID NO: 122919 - DNA, 26 bp, Homo sapiens
aacggactgttcttagaagctgaaag

SEQ ID NO: 122920 - DNA, 26 bp, Homo sapiens
acggactgttcttagaagctgaaagt

SEQ ID NO: 122921 - DNA, 26 bp, Homo sapiens
cggactgttcttagaagctgaaagtc

SEQ ID NO: 122922 - DNA, 26 bp, Homo sapiens
ggactgttcttagaagctgaaagtcc

SEQ ID NO: 122923 - DNA, 26 bp, Homo sapiens
gactgttcttagaagctgaaagtcca

SEQ ID NO: 122924 - DNA, 26 bp, Homo sapiens
actgttcttagaagctgaaagtccag

SEQ ID NO: 122925 - DNA, 26 bp, Homo sapiens
ctgttcttagaagctgaaagtccagc

SEQ ID NO: 122926 - DNA, 26 bp, Homo sapiens
tgttcttagaagctgaaagtccagcc

SEQ ID NO: 122927 - DNA, 26 bp, Homo sapiens
gttcttagaagctgaaagtccagccg

SEQ ID NO: 122928 - DNA, 26 bp, Homo sapiens
ttcttagaagctgaaagtccagccgg

SEQ ID NO: 122929 - DNA, 26 bp, Homo sapiens
tcttagaagctgaaagtccagccgga

SEQ ID NO: 122930 - DNA, 26 bp, Homo sapiens
cttagaagctgaaagtccagccggat

SEQ ID NO: 122931 - DNA, 26 bp, Homo sapiens
ttagaagctgaaagtccagccggatt

SEQ ID NO: 122932 - DNA, 26 bp, Homo sapiens
tagaagctgaaagtccagccggattt

SEQ ID NO: 122933 - DNA, 26 bp, Homo sapiens
agaagctgaaagtccagccggattta

SEQ ID NO: 122934 - DNA, 26 bp, Homo sapiens
gaagctgaaagtccagccggatttac

SEQ ID NO: 122935 - DNA, 26 bp, Homo sapiens
aagctgaaagtccagccggatttaca

SEQ ID NO: 122936 - DNA, 26 bp, Homo sapiens
agctgaaagtccagccggatttacag

SEQ ID NO: 122937 - DNA, 26 bp, Homo sapiens
gctgaaagtccagccggatttacaga

SEQ ID NO: 122938 - DNA, 26 bp, Homo sapiens
ctgaaagtccagccggatttacagac

SEQ ID NO: 122939 - DNA, 26 bp, Homo sapiens
tgaaagtccagccggatttacagaca

SEQ ID NO: 122940 - DNA, 26 bp, Homo sapiens
gaaagtccagccggatttacagacat

SEQ ID NO: 122941 - DNA, 26 bp, Homo sapiens
aaagtccagccggatttacagacatc

SEQ ID NO: 122942 - DNA, 26 bp, Homo sapiens
aagtccagccggatttacagacatcc

SEQ ID NO: 122943 - DNA, 26 bp, Homo sapiens
agtccagccggatttacagacatcca

SEQ ID NO: 122944 - DNA, 26 bp, Homo sapiens
gtccagccggatttacagacatccaa

SEQ ID NO: 122945 - DNA, 26 bp, Homo sapiens
tccagccggatttacagacatccaag

SEQ ID NO: 122946 - DNA, 26 bp, Homo sapiens
ccagccggatttacagacatccaagt

SEQ ID NO: 122947 - DNA, 26 bp, Homo sapiens
cagccggatttacagacatccaagta

SEQ ID NO: 122948 - DNA, 26 bp, Homo sapiens
agccggatttacagacatccaagtaa

SEQ ID NO: 122949 - DNA, 26 bp, Homo sapiens
gccggatttacagacatccaagtaag

SEQ ID NO: 122950 - DNA, 26 bp, Homo sapiens
ccggatttacagacatccaagtaaga

SEQ ID NO: 122951 - DNA, 26 bp, Homo sapiens
cggatttacagacatccaagtaagag

SEQ ID NO: 122952 - DNA, 26 bp, Homo sapiens
ggatttacagacatccaagtaagagt

SEQ ID NO: 122953 - DNA, 26 bp, Homo sapiens
gatttacagacatccaagtaagagtc

SEQ ID NO: 122954 - DNA, 26 bp, Homo sapiens
atttacagacatccaagtaagagtct

SEQ ID NO: 122955 - DNA, 26 bp, Homo sapiens
tttacagacatccaagtaagagtctg

SEQ ID NO: 122956 - DNA, 26 bp, Homo sapiens
ttacagacatccaagtaagagtctgt

SEQ ID NO: 122957 - DNA, 26 bp, Homo sapiens
tacagacatccaagtaagagtctgtg

SEQ ID NO: 122958 - DNA, 26 bp, Homo sapiens
acagacatccaagtaagagtctgtga

SEQ ID NO: 122959 - DNA, 26 bp, Homo sapiens
cagacatccaagtaagagtctgtgag

SEQ ID NO: 122960 - DNA, 26 bp, Homo sapiens
agacatccaagtaagagtctgtgaga

SEQ ID NO: 122961 - DNA, 26 bp, Homo sapiens
gacatccaagtaagagtctgtgagaa

SEQ ID NO: 122962 - DNA, 26 bp, Homo sapiens
acatccaagtaagagtctgtgagaac

SEQ ID NO: 122963 - DNA, 26 bp, Homo sapiens
catccaagtaagagtctgtgagaacc

SEQ ID NO: 122964 - DNA, 26 bp, Homo sapiens
atccaagtaagagtctgtgagaaccg

SEQ ID NO: 122965 - DNA, 26 bp, Homo sapiens
tccaagtaagagtctgtgagaaccga

SEQ ID NO: 122966 - DNA, 26 bp, Homo sapiens
ccaagtaagagtctgtgagaaccgaa

SEQ ID NO: 122967 - DNA, 26 bp, Homo sapiens
caagtaagagtctgtgagaaccgaaa

SEQ ID NO: 122968 - DNA, 26 bp, Homo sapiens
aagtaagagtctgtgagaaccgaaat

SEQ ID NO: 122969 - DNA, 26 bp, Homo sapiens
agtaagagtctgtgagaaccgaaatt

SEQ ID NO: 122970 - DNA, 26 bp, Homo sapiens
ttttatgaggcaaaaggcaatgaatg

SEQ ID NO: 122971 - DNA, 26 bp, Homo sapiens
tttatgaggcaaaaggcaatgaatgt

SEQ ID NO: 122972 - DNA, 26 bp, Homo sapiens
ttatgaggcaaaaggcaatgaatgtt

SEQ ID NO: 122973 - DNA, 26 bp, Homo sapiens
tatgaggcaaaaggcaatgaatgttt

SEQ ID NO: 122974 - DNA, 26 bp, Homo sapiens
atgaggcaaaaggcaatgaatgtttt

SEQ ID NO: 122975 - DNA, 26 bp, Homo sapiens
tgaggcaaaaggcaatgaatgttttt

SEQ ID NO: 122976 - DNA, 26 bp, Homo sapiens
gaggcaaaaggcaatgaatgttttta

SEQ ID NO: 122977 - DNA, 26 bp, Homo sapiens
aggcaaaaggcaatgaatgtttttat

SEQ ID NO: 122978 - DNA, 26 bp, Homo sapiens
ggcaaaaggcaatgaatgtttttatt

SEQ ID NO: 122979 - DNA, 26 bp, Homo sapiens
gcaaaaggcaatgaatgtttttattt

SEQ ID NO: 122980 - DNA, 26 bp, Homo sapiens
caaaaggcaatgaatgtttttatttg

SEQ ID NO: 122981 - DNA, 26 bp, Homo sapiens
aaaaggcaatgaatgtttttatttgt

SEQ ID NO: 122982 - DNA, 26 bp, Homo sapiens
aaaggcaatgaatgtttttatttgtt

SEQ ID NO: 122983 - DNA, 26 bp, Homo sapiens
aaggcaatgaatgtttttatttgtta

SEQ ID NO: 122984 - DNA, 26 bp, Homo sapiens
aggcaatgaatgtttttatttgttaa

SEQ ID NO: 122985 - DNA, 26 bp, Homo sapiens
ggcaatgaatgtttttatttgttaat

SEQ ID NO: 122986 - DNA, 26 bp, Homo sapiens
gcaatgaatgtttttatttgttaatc

SEQ ID NO: 122987 - DNA, 26 bp, Homo sapiens
caatgaatgtttttatttgttaatcc

SEQ ID NO: 122988 - DNA, 26 bp, Homo sapiens
aatgaatgtttttatttgttaatcca

SEQ ID NO: 122989 - DNA, 26 bp, Homo sapiens
atgaatgtttttatttgttaatccac

SEQ ID NO: 122990 - DNA, 26 bp, Homo sapiens
tgaatgtttttatttgttaatccaca

SEQ ID NO: 122991 - DNA, 26 bp, Homo sapiens
gaatgtttttatttgttaatccacat

SEQ ID NO: 122992 - DNA, 26 bp, Homo sapiens
aatgtttttatttgttaatccacatt

SEQ ID NO: 122993 - DNA, 26 bp, Homo sapiens
atgtttttatttgttaatccacatta

SEQ ID NO: 122994 - DNA, 26 bp, Homo sapiens
tgtttttatttgttaatccacattag

SEQ ID NO: 122995 - DNA, 26 bp, Homo sapiens
gtttttatttgttaatccacattagc

SEQ ID NO: 122996 - DNA, 26 bp, Homo sapiens
tttttatttgttaatccacattagca

SEQ ID NO: 122997 - DNA, 26 bp, Homo sapiens
ttttatttgttaatccacattagcag

SEQ ID NO: 122998 - DNA, 26 bp, Homo sapiens
tttatttgttaatccacattagcagc

SEQ ID NO: 122999 - DNA, 26 bp, Homo sapiens
ttatttgttaatccacattagcagca

SEQ ID NO: 123000 - DNA, 26 bp, Homo sapiens
tatttgttaatccacattagcagcaa

SEQ ID NO: 123001 - DNA, 26 bp, Homo sapiens
atttgttaatccacattagcagcaac

SEQ ID NO: 123002 - DNA, 26 bp, Homo sapiens
tttgttaatccacattagcagcaaca

SEQ ID NO: 123003 - DNA, 26 bp, Homo sapiens
ttgttaatccacattagcagcaacac

SEQ ID NO: 123004 - DNA, 26 bp, Homo sapiens
tgttaatccacattagcagcaacacc

SEQ ID NO: 123005 - DNA, 26 bp, Homo sapiens
gttaatccacattagcagcaacacca

SEQ ID NO: 123006 - DNA, 26 bp, Homo sapiens
ttaatccacattagcagcaacaccag

SEQ ID NO: 123007 - DNA, 26 bp, Homo sapiens
taatccacattagcagcaacaccaga

SEQ ID NO: 123008 - DNA, 26 bp, Homo sapiens
aatccacattagcagcaacaccagaa

SEQ ID NO: 123009 - DNA, 26 bp, Homo sapiens
atccacattagcagcaacaccagaaa

SEQ ID NO: 123010 - DNA, 26 bp, Homo sapiens
tccacattagcagcaacaccagaaaa

SEQ ID NO: 123011 - DNA, 26 bp, Homo sapiens
ccacattagcagcaacaccagaaaaa

SEQ ID NO: 123012 - DNA, 26 bp, Homo sapiens
cacattagcagcaacaccagaaaaat

SEQ ID NO: 123013 - DNA, 26 bp, Homo sapiens
acattagcagcaacaccagaaaaatc

SEQ ID NO: 123014 - DNA, 26 bp, Homo sapiens
cattagcagcaacaccagaaaaatca

SEQ ID NO: 123015 - DNA, 26 bp, Homo sapiens
attagcagcaacaccagaaaaatcat

SEQ ID NO: 123016 - DNA, 26 bp, Homo sapiens
ttagcagcaacaccagaaaaatcatt

SEQ ID NO: 123017 - DNA, 26 bp, Homo sapiens
tagcagcaacaccagaaaaatcatta

SEQ ID NO: 123018 - DNA, 26 bp, Homo sapiens
agcagcaacaccagaaaaatcattaa

SEQ ID NO: 123019 - DNA, 26 bp, Homo sapiens
gcagcaacaccagaaaaatcattaac

SEQ ID NO: 123020 - DNA, 26 bp, Homo sapiens
cagcaacaccagaaaaatcattaacc

SEQ ID NO: 123021 - DNA, 26 bp, Homo sapiens
agcaacaccagaaaaatcattaacca

SEQ ID NO: 123022 - DNA, 26 bp, Homo sapiens
gcaacaccagaaaaatcattaaccac

SEQ ID NO: 123023 - DNA, 26 bp, Homo sapiens
caacaccagaaaaatcattaaccacc

SEQ ID NO: 123024 - DNA, 26 bp, Homo sapiens
aacaccagaaaaatcattaaccaccc

SEQ ID NO: 123025 - DNA, 26 bp, Homo sapiens
acaccagaaaaatcattaaccacccc

SEQ ID NO: 123026 - DNA, 26 bp, Homo sapiens
caccagaaaaatcattaaccacccca

SEQ ID NO: 123027 - DNA, 26 bp, Homo sapiens
accagaaaaatcattaaccaccccac

SEQ ID NO: 123028 - DNA, 26 bp, Homo sapiens
ccagaaaaatcattaaccaccccacc

SEQ ID NO: 123029 - DNA, 26 bp, Homo sapiens
cagaaaaatcattaaccaccccacct

SEQ ID NO: 123030 - DNA, 26 bp, Homo sapiens
agaaaaatcattaaccaccccaccta

SEQ ID NO: 123031 - DNA, 26 bp, Homo sapiens
gaaaaatcattaaccaccccacctag

SEQ ID NO: 123032 - DNA, 26 bp, Homo sapiens
aaaaatcattaaccaccccacctagc

SEQ ID NO: 123033 - DNA, 26 bp, Homo sapiens
aaaatcattaaccaccccacctagca

SEQ ID NO: 123034 - DNA, 26 bp, Homo sapiens
aaatcattaaccaccccacctagcat

SEQ ID NO: 123035 - DNA, 26 bp, Homo sapiens
aatcattaaccaccccacctagcatt

SEQ ID NO: 123036 - DNA, 26 bp, Homo sapiens
atcattaaccaccccacctagcattg

SEQ ID NO: 123037 - DNA, 26 bp, Homo sapiens
tcattaaccaccccacctagcattga

SEQ ID NO: 123038 - DNA, 26 bp, Homo sapiens
cattaaccaccccacctagcattgaa

SEQ ID NO: 123039 - DNA, 26 bp, Homo sapiens
attaaccaccccacctagcattgaaa

SEQ ID NO: 123040 - DNA, 26 bp, Homo sapiens
ttaaccaccccacctagcattgaaac

SEQ ID NO: 123041 - DNA, 26 bp, Homo sapiens
taaccaccccacctagcattgaaact

SEQ ID NO: 123042 - DNA, 26 bp, Homo sapiens
aaccaccccacctagcattgaaactg

SEQ ID NO: 123043 - DNA, 26 bp, Homo sapiens
accaccccacctagcattgaaactga

SEQ ID NO: 123044 - DNA, 26 bp, Homo sapiens
ccaccccacctagcattgaaactgac

SEQ ID NO: 123045 - DNA, 26 bp, Homo sapiens
caccccacctagcattgaaactgact

SEQ ID NO: 123046 - DNA, 26 bp, Homo sapiens
accccacctagcattgaaactgactc

SEQ ID NO: 123047 - DNA, 26 bp, Homo sapiens
ccccacctagcattgaaactgactcc

SEQ ID NO: 123048 - DNA, 26 bp, Homo sapiens
cccacctagcattgaaactgactcca

SEQ ID NO: 123049 - DNA, 26 bp, Homo sapiens
ccacctagcattgaaactgactccac

SEQ ID NO: 123050 - DNA, 26 bp, Homo sapiens
cacctagcattgaaactgactccact

SEQ ID NO: 123051 - DNA, 26 bp, Homo sapiens
acctagcattgaaactgactccactt

SEQ ID NO: 123052 - DNA, 26 bp, Homo sapiens
cctagcattgaaactgactccactta

SEQ ID NO: 123053 - DNA, 26 bp, Homo sapiens
ctagcattgaaactgactccacttat

SEQ ID NO: 123054 - DNA, 26 bp, Homo sapiens
tagcattgaaactgactccacttatc

SEQ ID NO: 123055 - DNA, 26 bp, Homo sapiens
agcattgaaactgactccacttatcg

SEQ ID NO: 123056 - DNA, 26 bp, Homo sapiens
gcattgaaactgactccacttatcgc

SEQ ID NO: 123057 - DNA, 26 bp, Homo sapiens
cattgaaactgactccacttatcgct

SEQ ID NO: 123058 - DNA, 26 bp, Homo sapiens
attgaaactgactccacttatcgctt

SEQ ID NO: 123059 - DNA, 26 bp, Homo sapiens
ttgaaactgactccacttatcgcttc

SEQ ID NO: 123060 - DNA, 26 bp, Homo sapiens
tgaaactgactccacttatcgcttct

SEQ ID NO: 123061 - DNA, 26 bp, Homo sapiens
gaaactgactccacttatcgcttctt

SEQ ID NO: 123062 - DNA, 26 bp, Homo sapiens
aaactgactccacttatcgcttcttc

SEQ ID NO: 123063 - DNA, 26 bp, Homo sapiens
aactgactccacttatcgcttcttct

SEQ ID NO: 123064 - DNA, 26 bp, Homo sapiens
actgactccacttatcgcttcttctt

SEQ ID NO: 123065 - DNA, 26 bp, Homo sapiens
ctgactccacttatcgcttcttcttt

SEQ ID NO: 123066 - DNA, 26 bp, Homo sapiens
tgactccacttatcgcttcttctttt

SEQ ID NO: 123067 - DNA, 26 bp, Homo sapiens
gactccacttatcgcttcttcttttt

SEQ ID NO: 123068 - DNA, 26 bp, Homo sapiens
actccacttatcgcttcttcttttta

SEQ ID NO: 123069 - DNA, 26 bp, Homo sapiens
ctccacttatcgcttcttctttttaa

SEQ ID NO: 123070 - DNA, 26 bp, Homo sapiens
tccacttatcgcttcttctttttaaa

SEQ ID NO: 123071 - DNA, 26 bp, Homo sapiens
ccacttatcgcttcttctttttaaat

SEQ ID NO: 123072 - DNA, 26 bp, Homo sapiens
cacttatcgcttcttctttttaaatt

SEQ ID NO: 123073 - DNA, 26 bp, Homo sapiens
acttatcgcttcttctttttaaatta

SEQ ID NO: 123074 - DNA, 26 bp, Homo sapiens
cttatcgcttcttctttttaaattat

SEQ ID NO: 123075 - DNA, 26 bp, Homo sapiens
ttatcgcttcttctttttaaattata

SEQ ID NO: 123076 - DNA, 26 bp, Homo sapiens
tatcgcttcttctttttaaattataa

SEQ ID NO: 123077 - DNA, 26 bp, Homo sapiens
atcgcttcttctttttaaattataat

SEQ ID NO: 123078 - DNA, 26 bp, Homo sapiens
tcgcttcttctttttaaattataatg

SEQ ID NO: 123079 - DNA, 26 bp, Homo sapiens
cgcttcttctttttaaattataatgt

SEQ ID NO: 123080 - DNA, 26 bp, Homo sapiens
gcttcttctttttaaattataatgta

SEQ ID NO: 123081 - DNA, 26 bp, Homo sapiens
cttcttctttttaaattataatgtaa

SEQ ID NO: 123082 - DNA, 26 bp, Homo sapiens
ttcttctttttaaattataatgtaaa

SEQ ID NO: 123083 - DNA, 26 bp, Homo sapiens
tcttctttttaaattataatgtaaaa

SEQ ID NO: 123084 - DNA, 26 bp, Homo sapiens
cttctttttaaattataatgtaaaaa

SEQ ID NO: 123085 - DNA, 26 bp, Homo sapiens
ttctttttaaattataatgtaaaaat

SEQ ID NO: 123086 - DNA, 26 bp, Homo sapiens
tctttttaaattataatgtaaaaatg

SEQ ID NO: 123087 - DNA, 26 bp, Homo sapiens
ctttttaaattataatgtaaaaatga

SEQ ID NO: 123088 - DNA, 26 bp, Homo sapiens
tttttaaattataatgtaaaaatgaa

SEQ ID NO: 123089 - DNA, 26 bp, Homo sapiens
ttttaaattataatgtaaaaatgaat

SEQ ID NO: 123090 - DNA, 26 bp, Homo sapiens
tttaaattataatgtaaaaatgaatt

SEQ ID NO: 123091 - DNA, 26 bp, Homo sapiens
ttaaattataatgtaaaaatgaattg

SEQ ID NO: 123092 - DNA, 26 bp, Homo sapiens
taaattataatgtaaaaatgaattgc

SEQ ID NO: 123093 - DNA, 26 bp, Homo sapiens
aaattataatgtaaaaatgaattgca

SEQ ID NO: 123094 - DNA, 26 bp, Homo sapiens
aattataatgtaaaaatgaattgcaa

SEQ ID NO: 123095 - DNA, 26 bp, Homo sapiens
attataatgtaaaaatgaattgcaaa

SEQ ID NO: 123096 - DNA, 26 bp, Homo sapiens
ttataatgtaaaaatgaattgcaaaa

SEQ ID NO: 123097 - DNA, 26 bp, Homo sapiens
tataatgtaaaaatgaattgcaaaat

SEQ ID NO: 123098 - DNA, 26 bp, Homo sapiens
ataatgtaaaaatgaattgcaaaata

SEQ ID NO: 123099 - DNA, 26 bp, Homo sapiens
taatgtaaaaatgaattgcaaaatat

SEQ ID NO: 123100 - DNA, 26 bp, Homo sapiens
aatgtaaaaatgaattgcaaaatata

SEQ ID NO: 123101 - DNA, 26 bp, Homo sapiens
atgtaaaaatgaattgcaaaatatat

SEQ ID NO: 123102 - DNA, 26 bp, Homo sapiens
tgtaaaaatgaattgcaaaatatatt

SEQ ID NO: 123103 - DNA, 26 bp, Homo sapiens
gtaaaaatgaattgcaaaatatattt

SEQ ID NO: 123104 - DNA, 26 bp, Homo sapiens
taaaaatgaattgcaaaatatatttt

SEQ ID NO: 123105 - DNA, 26 bp, Homo sapiens
aaaaatgaattgcaaaatatatttta

SEQ ID NO: 123106 - DNA, 26 bp, Homo sapiens
aaaatgaattgcaaaatatattttat

SEQ ID NO: 123107 - DNA, 26 bp, Homo sapiens
aaatgaattgcaaaatatattttatt

SEQ ID NO: 123108 - DNA, 26 bp, Homo sapiens
aatgaattgcaaaatatattttattt

SEQ ID NO: 123109 - DNA, 26 bp, Homo sapiens
atgaattgcaaaatatattttatttg

SEQ ID NO: 123110 - DNA, 26 bp, Homo sapiens
tgaattgcaaaatatattttatttga

SEQ ID NO: 123111 - DNA, 26 bp, Homo sapiens
gaattgcaaaatatattttatttgaa

SEQ ID NO: 123112 - DNA, 26 bp, Homo sapiens
aattgcaaaatatattttatttgaac

SEQ ID NO: 123113 - DNA, 26 bp, Homo sapiens
attgcaaaatatattttatttgaact

SEQ ID NO: 123114 - DNA, 26 bp, Homo sapiens
ttgcaaaatatattttatttgaactt

SEQ ID NO: 123115 - DNA, 26 bp, Homo sapiens
tgcaaaatatattttatttgaactta

SEQ ID NO: 123116 - DNA, 26 bp, Homo sapiens
gcaaaatatattttatttgaacttac

SEQ ID NO: 123117 - DNA, 26 bp, Homo sapiens
caaaatatattttatttgaacttact

SEQ ID NO: 123118 - DNA, 26 bp, Homo sapiens
aaaatatattttatttgaacttactg

SEQ ID NO: 123119 - DNA, 26 bp, Homo sapiens
aaatatattttatttgaacttactga

SEQ ID NO: 123120 - DNA, 26 bp, Homo sapiens
aatatattttatttgaacttactgaa

SEQ ID NO: 123121 - DNA, 26 bp, Homo sapiens
atatattttatttgaacttactgaag

SEQ ID NO: 123122 - DNA, 26 bp, Homo sapiens
tatattttatttgaacttactgaagt

SEQ ID NO: 123123 - DNA, 26 bp, Homo sapiens
atattttatttgaacttactgaagtc

SEQ ID NO: 123124 - DNA, 26 bp, Homo sapiens
tattttatttgaacttactgaagtca

SEQ ID NO: 123125 - DNA, 26 bp, Homo sapiens
attttatttgaacttactgaagtcaa

SEQ ID NO: 123126 - DNA, 26 bp, Homo sapiens
ttttatttgaacttactgaagtcaaa

SEQ ID NO: 123127 - DNA, 26 bp, Homo sapiens
tttatttgaacttactgaagtcaaaa

SEQ ID NO: 123128 - DNA, 26 bp, Homo sapiens
ttatttgaacttactgaagtcaaaat

SEQ ID NO: 123129 - DNA, 26 bp, Homo sapiens
tatttgaacttactgaagtcaaaatc

SEQ ID NO: 123130 - DNA, 26 bp, Homo sapiens
atttgaacttactgaagtcaaaatca

SEQ ID NO: 123131 - DNA, 26 bp, Homo sapiens
tttgaacttactgaagtcaaaatcat

SEQ ID NO: 123132 - DNA, 26 bp, Homo sapiens
ttgaacttactgaagtcaaaatcata

SEQ ID NO: 123133 - DNA, 26 bp, Homo sapiens
tgaacttactgaagtcaaaatcatag

SEQ ID NO: 123134 - DNA, 26 bp, Homo sapiens
gaacttactgaagtcaaaatcatagg

SEQ ID NO: 123135 - DNA, 26 bp, Homo sapiens
aacttactgaagtcaaaatcatagga

SEQ ID NO: 123136 - DNA, 26 bp, Homo sapiens
acttactgaagtcaaaatcataggaa

SEQ ID NO: 123137 - DNA, 26 bp, Homo sapiens
cttactgaagtcaaaatcataggaac

SEQ ID NO: 123138 - DNA, 26 bp, Homo sapiens
ttactgaagtcaaaatcataggaacc

SEQ ID NO: 123139 - DNA, 26 bp, Homo sapiens
tactgaagtcaaaatcataggaacca

SEQ ID NO: 123140 - DNA, 26 bp, Homo sapiens
actgaagtcaaaatcataggaaccag

SEQ ID NO: 123141 - DNA, 26 bp, Homo sapiens
ctgaagtcaaaatcataggaaccaga

SEQ ID NO: 123142 - DNA, 26 bp, Homo sapiens
tgaagtcaaaatcataggaaccagat

SEQ ID NO: 123143 - DNA, 26 bp, Homo sapiens
gaagtcaaaatcataggaaccagata

SEQ ID NO: 123144 - DNA, 26 bp, Homo sapiens
aagtcaaaatcataggaaccagatat

SEQ ID NO: 123145 - DNA, 26 bp, Homo sapiens
agtcaaaatcataggaaccagatatt

SEQ ID NO: 123146 - DNA, 26 bp, Homo sapiens
gtcaaaatcataggaaccagatattt

SEQ ID NO: 123147 - DNA, 26 bp, Homo sapiens
tcaaaatcataggaaccagatattta

SEQ ID NO: 123148 - DNA, 26 bp, Homo sapiens
caaaatcataggaaccagatatttaa

SEQ ID NO: 123149 - DNA, 26 bp, Homo sapiens
aaaatcataggaaccagatatttaaa

SEQ ID NO: 123150 - DNA, 26 bp, Homo sapiens
aaatcataggaaccagatatttaaat

SEQ ID NO: 123151 - DNA, 26 bp, Homo sapiens
aatcataggaaccagatatttaaata

SEQ ID NO: 123152 - DNA, 26 bp, Homo sapiens
atcataggaaccagatatttaaataa

SEQ ID NO: 123153 - DNA, 26 bp, Homo sapiens
tcataggaaccagatatttaaataaa

SEQ ID NO: 123154 - DNA, 26 bp, Homo sapiens
cataggaaccagatatttaaataaag

SEQ ID NO: 123155 - DNA, 26 bp, Homo sapiens
ataggaaccagatatttaaataaagt

SEQ ID NO: 123156 - DNA, 26 bp, Homo sapiens
taggaaccagatatttaaataaagtt

SEQ ID NO: 123157 - DNA, 26 bp, Homo sapiens
aggaaccagatatttaaataaagttt

SEQ ID NO: 123158 - DNA, 26 bp, Homo sapiens
ggaaccagatatttaaataaagttta

SEQ ID NO: 123159 - DNA, 26 bp, Homo sapiens
gaaccagatatttaaataaagtttaa

SEQ ID NO: 123160 - DNA, 26 bp, Homo sapiens
aaccagatatttaaataaagtttaaa

SEQ ID NO: 123161 - DNA, 26 bp, Homo sapiens
accagatatttaaataaagtttaaat

SEQ ID NO: 123162 - DNA, 26 bp, Homo sapiens
ccagatatttaaataaagtttaaatc

SEQ ID NO: 123163 - DNA, 26 bp, Homo sapiens
cagatatttaaataaagtttaaatct

SEQ ID NO: 123164 - DNA, 26 bp, Homo sapiens
agatatttaaataaagtttaaatcta

SEQ ID NO: 123165 - DNA, 26 bp, Homo sapiens
gatatttaaataaagtttaaatctaa

SEQ ID NO: 123166 - DNA, 26 bp, Homo sapiens
atatttaaataaagtttaaatctaaa

SEQ ID NO: 123167 - DNA, 26 bp, Homo sapiens
tatttaaataaagtttaaatctaaag

SEQ ID NO: 123168 - DNA, 26 bp, Homo sapiens
atttaaataaagtttaaatctaaagt

SEQ ID NO: 123169 - DNA, 26 bp, Homo sapiens
tttaaataaagtttaaatctaaagtt

SEQ ID NO: 123170 - DNA, 26 bp, Homo sapiens
ttaaataaagtttaaatctaaagttt

SEQ ID NO: 123171 - DNA, 26 bp, Homo sapiens
taaataaagtttaaatctaaagttta

SEQ ID NO: 123172 - DNA, 26 bp, Homo sapiens
aaataaagtttaaatctaaagtttat

SEQ ID NO: 123173 - DNA, 26 bp, Homo sapiens
aataaagtttaaatctaaagtttata

SEQ ID NO: 123174 - DNA, 26 bp, Homo sapiens
ataaagtttaaatctaaagtttatat

SEQ ID NO: 123175 - DNA, 26 bp, Homo sapiens
taaagtttaaatctaaagtttatatt

SEQ ID NO: 123176 - DNA, 26 bp, Homo sapiens
aaagtttaaatctaaagtttatattt

SEQ ID NO: 123177 - DNA, 26 bp, Homo sapiens
aagtttaaatctaaagtttatatttt

SEQ ID NO: 123178 - DNA, 26 bp, Homo sapiens
agtttaaatctaaagtttatatttta

SEQ ID NO: 123179 - DNA, 26 bp, Homo sapiens
gtttaaatctaaagtttatattttaa

SEQ ID NO: 123180 - DNA, 26 bp, Homo sapiens
tttaaatctaaagtttatattttaaa

SEQ ID NO: 123181 - DNA, 26 bp, Homo sapiens
ttaaatctaaagtttatattttaaac

SEQ ID NO: 123182 - DNA, 26 bp, Homo sapiens
taaatctaaagtttatattttaaaca

SEQ ID NO: 123183 - DNA, 26 bp, Homo sapiens
aaatctaaagtttatattttaaacat

SEQ ID NO: 123184 - DNA, 26 bp, Homo sapiens
aatctaaagtttatattttaaacata

SEQ ID NO: 123185 - DNA, 26 bp, Homo sapiens
atctaaagtttatattttaaacataa

SEQ ID NO: 123186 - DNA, 26 bp, Homo sapiens
tctaaagtttatattttaaacataaa

SEQ ID NO: 123187 - DNA, 26 bp, Homo sapiens
ctaaagtttatattttaaacataaaa

SEQ ID NO: 123188 - DNA, 26 bp, Homo sapiens
taaagtttatattttaaacataaaat

SEQ ID NO: 123189 - DNA, 26 bp, Homo sapiens
aaagtttatattttaaacataaaatt

SEQ ID NO: 123190 - DNA, 26 bp, Homo sapiens
aagtttatattttaaacataaaattt

SEQ ID NO: 123191 - DNA, 26 bp, Homo sapiens
agtttatattttaaacataaaattta

SEQ ID NO: 123192 - DNA, 26 bp, Homo sapiens
gtttatattttaaacataaaatttaa

SEQ ID NO: 123193 - DNA, 26 bp, Homo sapiens
tttatattttaaacataaaatttaaa

SEQ ID NO: 123194 - DNA, 26 bp, Homo sapiens
ttatattttaaacataaaatttaaat

SEQ ID NO: 123195 - DNA, 26 bp, Homo sapiens
tatattttaaacataaaatttaaatc

SEQ ID NO: 123196 - DNA, 26 bp, Homo sapiens
atattttaaacataaaatttaaatcg

SEQ ID NO: 123197 - DNA, 26 bp, Homo sapiens
tattttaaacataaaatttaaatcgt

SEQ ID NO: 123198 - DNA, 26 bp, Homo sapiens
attttaaacataaaatttaaatcgtt

SEQ ID NO: 123199 - DNA, 26 bp, Homo sapiens
ttttaaacataaaatttaaatcgttt

SEQ ID NO: 123200 - DNA, 26 bp, Homo sapiens
tttaaacataaaatttaaatcgtttg

SEQ ID NO: 123201 - DNA, 26 bp, Homo sapiens
ttaaacataaaatttaaatcgtttgt

SEQ ID NO: 123202 - DNA, 26 bp, Homo sapiens
taaacataaaatttaaatcgtttgtt

SEQ ID NO: 123203 - DNA, 26 bp, Homo sapiens
aaacataaaatttaaatcgtttgttt

SEQ ID NO: 123204 - DNA, 26 bp, Homo sapiens
aacataaaatttaaatcgtttgtttt

SEQ ID NO: 123205 - DNA, 26 bp, Homo sapiens
acataaaatttaaatcgtttgttttg

SEQ ID NO: 123206 - DNA, 26 bp, Homo sapiens
cataaaatttaaatcgtttgttttga

SEQ ID NO: 123207 - DNA, 26 bp, Homo sapiens
ataaaatttaaatcgtttgttttgaa

SEQ ID NO: 123208 - DNA, 26 bp, Homo sapiens
taaaatttaaatcgtttgttttgaaa

SEQ ID NO: 123209 - DNA, 26 bp, Homo sapiens
aaaatttaaatcgtttgttttgaaaa

SEQ ID NO: 123210 - DNA, 26 bp, Homo sapiens
aaatttaaatcgtttgttttgaaaag

SEQ ID NO: 123211 - DNA, 26 bp, Homo sapiens
aatttaaatcgtttgttttgaaaagt

SEQ ID NO: 123212 - DNA, 26 bp, Homo sapiens
atttaaatcgtttgttttgaaaagta

SEQ ID NO: 123213 - DNA, 26 bp, Homo sapiens
tttaaatcgtttgttttgaaaagtat

SEQ ID NO: 123214 - DNA, 26 bp, Homo sapiens
ttaaatcgtttgttttgaaaagtata

SEQ ID NO: 123215 - DNA, 26 bp, Homo sapiens
taaatcgtttgttttgaaaagtatat

SEQ ID NO: 123216 - DNA, 26 bp, Homo sapiens
aaatcgtttgttttgaaaagtatatc

SEQ ID NO: 123217 - DNA, 26 bp, Homo sapiens
aatcgtttgttttgaaaagtatatcc

SEQ ID NO: 123218 - DNA, 26 bp, Homo sapiens
atcgtttgttttgaaaagtatatcct

SEQ ID NO: 123219 - DNA, 26 bp, Homo sapiens
tcgtttgttttgaaaagtatatcctt

SEQ ID NO: 123220 - DNA, 26 bp, Homo sapiens
cgtttgttttgaaaagtatatccttg

SEQ ID NO: 123221 - DNA, 26 bp, Homo sapiens
gtttgttttgaaaagtatatccttga

SEQ ID NO: 123222 - DNA, 26 bp, Homo sapiens
tttgttttgaaaagtatatccttgaa

SEQ ID NO: 123223 - DNA, 26 bp, Homo sapiens
ttgttttgaaaagtatatccttgaaa

SEQ ID NO: 123224 - DNA, 26 bp, Homo sapiens
tgttttgaaaagtatatccttgaaaa

SEQ ID NO: 123225 - DNA, 26 bp, Homo sapiens
gttttgaaaagtatatccttgaaaag

SEQ ID NO: 123226 - DNA, 26 bp, Homo sapiens
ttttgaaaagtatatccttgaaaagt

SEQ ID NO: 123227 - DNA, 26 bp, Homo sapiens
tttgaaaagtatatccttgaaaagta

SEQ ID NO: 123228 - DNA, 26 bp, Homo sapiens
ttgaaaagtatatccttgaaaagtat

SEQ ID NO: 123229 - DNA, 26 bp, Homo sapiens
tgaaaagtatatccttgaaaagtatt

SEQ ID NO: 123230 - DNA, 26 bp, Homo sapiens
gaaaagtatatccttgaaaagtattt

SEQ ID NO: 123231 - DNA, 26 bp, Homo sapiens
aaaagtatatccttgaaaagtatttt

SEQ ID NO: 123232 - DNA, 26 bp, Homo sapiens
aaagtatatccttgaaaagtattttg

SEQ ID NO: 123233 - DNA, 26 bp, Homo sapiens
aagtatatccttgaaaagtattttga

SEQ ID NO: 123234 - DNA, 26 bp, Homo sapiens
agtatatccttgaaaagtattttgat

SEQ ID NO: 123235 - DNA, 26 bp, Homo sapiens
gtatatccttgaaaagtattttgata

SEQ ID NO: 123236 - DNA, 26 bp, Homo sapiens
tatatccttgaaaagtattttgatat

SEQ ID NO: 123237 - DNA, 26 bp, Homo sapiens
atatccttgaaaagtattttgatata

SEQ ID NO: 123238 - DNA, 26 bp, Homo sapiens
tatccttgaaaagtattttgatatag

SEQ ID NO: 123239 - DNA, 26 bp, Homo sapiens
atccttgaaaagtattttgatataga

SEQ ID NO: 123240 - DNA, 26 bp, Homo sapiens
tccttgaaaagtattttgatatagat

SEQ ID NO: 123241 - DNA, 26 bp, Homo sapiens
ccttgaaaagtattttgatatagatg

SEQ ID NO: 123242 - DNA, 26 bp, Homo sapiens
cttgaaaagtattttgatatagatgg

SEQ ID NO: 123243 - DNA, 26 bp, Homo sapiens
ttgaaaagtattttgatatagatggg

SEQ ID NO: 123244 - DNA, 26 bp, Homo sapiens
tgaaaagtattttgatatagatggga

SEQ ID NO: 123245 - DNA, 26 bp, Homo sapiens
gaaaagtattttgatatagatgggaa

SEQ ID NO: 123246 - DNA, 26 bp, Homo sapiens
aaaagtattttgatatagatgggaag

SEQ ID NO: 123247 - DNA, 26 bp, Homo sapiens
aaagtattttgatatagatgggaaga

SEQ ID NO: 123248 - DNA, 26 bp, Homo sapiens
aagtattttgatatagatgggaagat

SEQ ID NO: 123249 - DNA, 26 bp, Homo sapiens
agtattttgatatagatgggaagatt

SEQ ID NO: 123250 - DNA, 26 bp, Homo sapiens
gtattttgatatagatgggaagattt

SEQ ID NO: 123251 - DNA, 26 bp, Homo sapiens
tattttgatatagatgggaagatttt

SEQ ID NO: 123252 - DNA, 26 bp, Homo sapiens
attttgatatagatgggaagattttc

SEQ ID NO: 123253 - DNA, 26 bp, Homo sapiens
ttttgatatagatgggaagattttca

SEQ ID NO: 123254 - DNA, 26 bp, Homo sapiens
tttgatatagatgggaagattttcat

SEQ ID NO: 123255 - DNA, 26 bp, Homo sapiens
ttgatatagatgggaagattttcata

SEQ ID NO: 123256 - DNA, 26 bp, Homo sapiens
tgatatagatgggaagattttcatag

SEQ ID NO: 123257 - DNA, 26 bp, Homo sapiens
gatatagatgggaagattttcataga

SEQ ID NO: 123258 - DNA, 26 bp, Homo sapiens
atatagatgggaagattttcatagac

SEQ ID NO: 123259 - DNA, 26 bp, Homo sapiens
tatagatgggaagattttcatagact

SEQ ID NO: 123260 - DNA, 26 bp, Homo sapiens
atagatgggaagattttcatagactg

SEQ ID NO: 123261 - DNA, 26 bp, Homo sapiens
tagatgggaagattttcatagactgg

SEQ ID NO: 123262 - DNA, 26 bp, Homo sapiens
agatgggaagattttcatagactggc

SEQ ID NO: 123263 - DNA, 26 bp, Homo sapiens
gatgggaagattttcatagactggca

SEQ ID NO: 123264 - DNA, 26 bp, Homo sapiens
atgggaagattttcatagactggcat

SEQ ID NO: 123265 - DNA, 26 bp, Homo sapiens
tgggaagattttcatagactggcatc

SEQ ID NO: 123266 - DNA, 26 bp, Homo sapiens
gggaagattttcatagactggcatct

SEQ ID NO: 123267 - DNA, 26 bp, Homo sapiens
ggaagattttcatagactggcatcta

SEQ ID NO: 123268 - DNA, 26 bp, Homo sapiens
gaagattttcatagactggcatctat

SEQ ID NO: 123269 - DNA, 26 bp, Homo sapiens
aagattttcatagactggcatctatt

SEQ ID NO: 123270 - DNA, 26 bp, Homo sapiens
agattttcatagactggcatctattt

SEQ ID NO: 123271 - DNA, 26 bp, Homo sapiens
gattttcatagactggcatctatttt

SEQ ID NO: 123272 - DNA, 26 bp, Homo sapiens
attttcatagactggcatctattttt

SEQ ID NO: 123273 - DNA, 26 bp, Homo sapiens
ttttcatagactggcatctatttttc

SEQ ID NO: 123274 - DNA, 26 bp, Homo sapiens
tttcatagactggcatctatttttcc

SEQ ID NO: 123275 - DNA, 26 bp, Homo sapiens
ttcatagactggcatctatttttcca

SEQ ID NO: 123276 - DNA, 26 bp, Homo sapiens
tcatagactggcatctatttttccac

SEQ ID NO: 123277 - DNA, 26 bp, Homo sapiens
catagactggcatctatttttccacc

SEQ ID NO: 123278 - DNA, 26 bp, Homo sapiens
atagactggcatctatttttccacct

SEQ ID NO: 123279 - DNA, 26 bp, Homo sapiens
tagactggcatctatttttccaccta

SEQ ID NO: 123280 - DNA, 26 bp, Homo sapiens
agactggcatctatttttccacctac

SEQ ID NO: 123281 - DNA, 26 bp, Homo sapiens
gactggcatctatttttccacctact

SEQ ID NO: 123282 - DNA, 26 bp, Homo sapiens
actggcatctatttttccacctactg

SEQ ID NO: 123283 - DNA, 26 bp, Homo sapiens
ctggcatctatttttccacctactgt

SEQ ID NO: 123284 - DNA, 26 bp, Homo sapiens
tggcatctatttttccacctactgtt

SEQ ID NO: 123285 - DNA, 26 bp, Homo sapiens
ggcatctatttttccacctactgttt

SEQ ID NO: 123286 - DNA, 26 bp, Homo sapiens
gcatctatttttccacctactgttta

SEQ ID NO: 123287 - DNA, 26 bp, Homo sapiens
catctatttttccacctactgtttaa

SEQ ID NO: 123288 - DNA, 26 bp, Homo sapiens
atctatttttccacctactgtttaat

SEQ ID NO: 123289 - DNA, 26 bp, Homo sapiens
tctatttttccacctactgtttaatg

SEQ ID NO: 123290 - DNA, 26 bp, Homo sapiens
ctatttttccacctactgtttaatga

SEQ ID NO: 123291 - DNA, 26 bp, Homo sapiens
tatttttccacctactgtttaatgaa

SEQ ID NO: 123292 - DNA, 26 bp, Homo sapiens
atttttccacctactgtttaatgaag

SEQ ID NO: 123293 - DNA, 26 bp, Homo sapiens
tttttccacctactgtttaatgaagt

SEQ ID NO: 123294 - DNA, 26 bp, Homo sapiens
ttttccacctactgtttaatgaagta

SEQ ID NO: 123295 - DNA, 26 bp, Homo sapiens
tttccacctactgtttaatgaagtaa

SEQ ID NO: 123296 - DNA, 26 bp, Homo sapiens
ttccacctactgtttaatgaagtaaa

SEQ ID NO: 123297 - DNA, 26 bp, Homo sapiens
tccacctactgtttaatgaagtaaac

SEQ ID NO: 123298 - DNA, 26 bp, Homo sapiens
ccacctactgtttaatgaagtaaact

SEQ ID NO: 123299 - DNA, 26 bp, Homo sapiens
cacctactgtttaatgaagtaaactg

SEQ ID NO: 123300 - DNA, 26 bp, Homo sapiens
acctactgtttaatgaagtaaactgt

SEQ ID NO: 123301 - DNA, 26 bp, Homo sapiens
cctactgtttaatgaagtaaactgtt

SEQ ID NO: 123302 - DNA, 26 bp, Homo sapiens
ctactgtttaatgaagtaaactgttg

SEQ ID NO: 123303 - DNA, 26 bp, Homo sapiens
tactgtttaatgaagtaaactgttga

SEQ ID NO: 123304 - DNA, 26 bp, Homo sapiens
actgtttaatgaagtaaactgttgaa

SEQ ID NO: 123305 - DNA, 26 bp, Homo sapiens
ctgtttaatgaagtaaactgttgaat

SEQ ID NO: 123306 - DNA, 26 bp, Homo sapiens
tgtttaatgaagtaaactgttgaatg

SEQ ID NO: 123307 - DNA, 26 bp, Homo sapiens
gtttaatgaagtaaactgttgaatga

SEQ ID NO: 123308 - DNA, 26 bp, Homo sapiens
tttaatgaagtaaactgttgaatgat

SEQ ID NO: 123309 - DNA, 26 bp, Homo sapiens
ttaatgaagtaaactgttgaatgatg

SEQ ID NO: 123310 - DNA, 26 bp, Homo sapiens
taatgaagtaaactgttgaatgatgt

SEQ ID NO: 123311 - DNA, 26 bp, Homo sapiens
aatgaagtaaactgttgaatgatgta

SEQ ID NO: 123312 - DNA, 26 bp, Homo sapiens
atgaagtaaactgttgaatgatgtaa

SEQ ID NO: 123313 - DNA, 26 bp, Homo sapiens
tgaagtaaactgttgaatgatgtaaa

SEQ ID NO: 123314 - DNA, 26 bp, Homo sapiens
gaagtaaactgttgaatgatgtaaac

SEQ ID NO: 123315 - DNA, 26 bp, Homo sapiens
aagtaaactgttgaatgatgtaaact

SEQ ID NO: 123316 - DNA, 26 bp, Homo sapiens
agtaaactgttgaatgatgtaaactg

SEQ ID NO: 123317 - DNA, 26 bp, Homo sapiens
gtaaactgttgaatgatgtaaactgt

SEQ ID NO: 123318 - DNA, 26 bp, Homo sapiens
taaactgttgaatgatgtaaactgtt

SEQ ID NO: 123319 - DNA, 26 bp, Homo sapiens
aaactgttgaatgatgtaaactgtta

SEQ ID NO: 123320 - DNA, 26 bp, Homo sapiens
aactgttgaatgatgtaaactgttaa

SEQ ID NO: 123321 - DNA, 26 bp, Homo sapiens
actgttgaatgatgtaaactgttaaa

SEQ ID NO: 123322 - DNA, 26 bp, Homo sapiens
ctgttgaatgatgtaaactgttaaat

SEQ ID NO: 123323 - DNA, 26 bp, Homo sapiens
tgttgaatgatgtaaactgttaaatg

SEQ ID NO: 123324 - DNA, 26 bp, Homo sapiens
gttgaatgatgtaaactgttaaatga

SEQ ID NO: 123325 - DNA, 26 bp, Homo sapiens
ttgaatgatgtaaactgttaaatgaa

SEQ ID NO: 123326 - DNA, 26 bp, Homo sapiens
tgaatgatgtaaactgttaaatgaag

SEQ ID NO: 123327 - DNA, 26 bp, Homo sapiens
gaatgatgtaaactgttaaatgaagt

SEQ ID NO: 123328 - DNA, 26 bp, Homo sapiens
aatgatgtaaactgttaaatgaagta

SEQ ID NO: 123329 - DNA, 26 bp, Homo sapiens
atgatgtaaactgttaaatgaagtaa

SEQ ID NO: 123330 - DNA, 26 bp, Homo sapiens
tgatgtaaactgttaaatgaagtaaa

SEQ ID NO: 123331 - DNA, 26 bp, Homo sapiens
gatgtaaactgttaaatgaagtaaac

SEQ ID NO: 123332 - DNA, 26 bp, Homo sapiens
atgtaaactgttaaatgaagtaaaca

SEQ ID NO: 123333 - DNA, 26 bp, Homo sapiens
tgtaaactgttaaatgaagtaaacag

SEQ ID NO: 123334 - DNA, 26 bp, Homo sapiens
gtaaactgttaaatgaagtaaacagt

SEQ ID NO: 123335 - DNA, 26 bp, Homo sapiens
taaactgttaaatgaagtaaacagtt

SEQ ID NO: 123336 - DNA, 26 bp, Homo sapiens
aaactgttaaatgaagtaaacagtta

SEQ ID NO: 123337 - DNA, 26 bp, Homo sapiens
aactgttaaatgaagtaaacagttaa

SEQ ID NO: 123338 - DNA, 26 bp, Homo sapiens
actgttaaatgaagtaaacagttaaa

SEQ ID NO: 123339 - DNA, 26 bp, Homo sapiens
ctgttaaatgaagtaaacagttaaaa

SEQ ID NO: 123340 - DNA, 26 bp, Homo sapiens
tgttaaatgaagtaaacagttaaaac

SEQ ID NO: 123341 - DNA, 26 bp, Homo sapiens
gttaaatgaagtaaacagttaaaact

SEQ ID NO: 123342 - DNA, 26 bp, Homo sapiens
ttaaatgaagtaaacagttaaaactg

SEQ ID NO: 123343 - DNA, 26 bp, Homo sapiens
taaatgaagtaaacagttaaaactga

SEQ ID NO: 123344 - DNA, 26 bp, Homo sapiens
aaatgaagtaaacagttaaaactgat

SEQ ID NO: 123345 - DNA, 26 bp, Homo sapiens
aatgaagtaaacagttaaaactgatg

SEQ ID NO: 123346 - DNA, 26 bp, Homo sapiens
atgaagtaaacagttaaaactgatga

SEQ ID NO: 123347 - DNA, 26 bp, Homo sapiens
tgaagtaaacagttaaaactgatgac

SEQ ID NO: 123348 - DNA, 26 bp, Homo sapiens
gaagtaaacagttaaaactgatgaca

SEQ ID NO: 123349 - DNA, 26 bp, Homo sapiens
aagtaaacagttaaaactgatgacat

SEQ ID NO: 123350 - DNA, 26 bp, Homo sapiens
agtaaacagttaaaactgatgacata

SEQ ID NO: 123351 - DNA, 26 bp, Homo sapiens
gtaaacagttaaaactgatgacataa

SEQ ID NO: 123352 - DNA, 26 bp, Homo sapiens
taaacagttaaaactgatgacataaa

SEQ ID NO: 123353 - DNA, 26 bp, Homo sapiens
aaacagttaaaactgatgacataaaa

SEQ ID NO: 123354 - DNA, 26 bp, Homo sapiens
aacagttaaaactgatgacataaaag

SEQ ID NO: 123355 - DNA, 26 bp, Homo sapiens
acagttaaaactgatgacataaaaga

SEQ ID NO: 123356 - DNA, 26 bp, Homo sapiens
cagttaaaactgatgacataaaagac

SEQ ID NO: 123357 - DNA, 26 bp, Homo sapiens
agttaaaactgatgacataaaagaca

SEQ ID NO: 123358 - DNA, 26 bp, Homo sapiens
gttaaaactgatgacataaaagacaa

SEQ ID NO: 123359 - DNA, 26 bp, Homo sapiens
ttaaaactgatgacataaaagacaag

SEQ ID NO: 123360 - DNA, 26 bp, Homo sapiens
taaaactgatgacataaaagacaagc

SEQ ID NO: 123361 - DNA, 26 bp, Homo sapiens
aaaactgatgacataaaagacaagca

SEQ ID NO: 123362 - DNA, 26 bp, Homo sapiens
aaactgatgacataaaagacaagcaa

SEQ ID NO: 123363 - DNA, 26 bp, Homo sapiens
aactgatgacataaaagacaagcaaa

SEQ ID NO: 123364 - DNA, 26 bp, Homo sapiens
actgatgacataaaagacaagcaaag

SEQ ID NO: 123365 - DNA, 26 bp, Homo sapiens
ctgatgacataaaagacaagcaaagc

SEQ ID NO: 123366 - DNA, 26 bp, Homo sapiens
tgatgacataaaagacaagcaaagcg

SEQ ID NO: 123367 - DNA, 26 bp, Homo sapiens
gatgacataaaagacaagcaaagcga

SEQ ID NO: 123368 - DNA, 26 bp, Homo sapiens
atgacataaaagacaagcaaagcgaa

SEQ ID NO: 123369 - DNA, 26 bp, Homo sapiens
tgacataaaagacaagcaaagcgaag

SEQ ID NO: 123370 - DNA, 26 bp, Homo sapiens
gacataaaagacaagcaaagcgaagg

SEQ ID NO: 123371 - DNA, 26 bp, Homo sapiens
acataaaagacaagcaaagcgaagga

SEQ ID NO: 123372 - DNA, 26 bp, Homo sapiens
cataaaagacaagcaaagcgaaggaa

SEQ ID NO: 123373 - DNA, 26 bp, Homo sapiens
ataaaagacaagcaaagcgaaggaaa

SEQ ID NO: 123374 - DNA, 26 bp, Homo sapiens
taaaagacaagcaaagcgaaggaaac

SEQ ID NO: 123375 - DNA, 26 bp, Homo sapiens
aaaagacaagcaaagcgaaggaaaca

SEQ ID NO: 123376 - DNA, 26 bp, Homo sapiens
aaagacaagcaaagcgaaggaaacat

SEQ ID NO: 123377 - DNA, 26 bp, Homo sapiens
aagacaagcaaagcgaaggaaacatg

SEQ ID NO: 123378 - DNA, 26 bp, Homo sapiens
agacaagcaaagcgaaggaaacatgt

SEQ ID NO: 123379 - DNA, 26 bp, Homo sapiens
gacaagcaaagcgaaggaaacatgtt

SEQ ID NO: 123380 - DNA, 26 bp, Homo sapiens
acaagcaaagcgaaggaaacatgtta

SEQ ID NO: 123381 - DNA, 26 bp, Homo sapiens
caagcaaagcgaaggaaacatgttat

SEQ ID NO: 123382 - DNA, 26 bp, Homo sapiens
aagcaaagcgaaggaaacatgttata

SEQ ID NO: 123383 - DNA, 26 bp, Homo sapiens
agcaaagcgaaggaaacatgttataa

SEQ ID NO: 123384 - DNA, 26 bp, Homo sapiens
gcaaagcgaaggaaacatgttataaa

SEQ ID NO: 123385 - DNA, 26 bp, Homo sapiens
caaagcgaaggaaacatgttataaaa

SEQ ID NO: 123386 - DNA, 26 bp, Homo sapiens
aaagcgaaggaaacatgttataaaag

SEQ ID NO: 123387 - DNA, 26 bp, Homo sapiens
aagcgaaggaaacatgttataaaaga

SEQ ID NO: 123388 - DNA, 26 bp, Homo sapiens
agcgaaggaaacatgttataaaagat

SEQ ID NO: 123389 - DNA, 26 bp, Homo sapiens
gcgaaggaaacatgttataaaagata

SEQ ID NO: 123390 - DNA, 26 bp, Homo sapiens
cgaaggaaacatgttataaaagataa

SEQ ID NO: 123391 - DNA, 26 bp, Homo sapiens
gaaggaaacatgttataaaagataag

SEQ ID NO: 123392 - DNA, 26 bp, Homo sapiens
aaggaaacatgttataaaagataagt

SEQ ID NO: 123393 - DNA, 26 bp, Homo sapiens
aggaaacatgttataaaagataagta

SEQ ID NO: 123394 - DNA, 26 bp, Homo sapiens
ggaaacatgttataaaagataagtat

SEQ ID NO: 123395 - DNA, 26 bp, Homo sapiens
gaaacatgttataaaagataagtatt

SEQ ID NO: 123396 - DNA, 26 bp, Homo sapiens
aaacatgttataaaagataagtatta

SEQ ID NO: 123397 - DNA, 26 bp, Homo sapiens
aacatgttataaaagataagtattac

SEQ ID NO: 123398 - DNA, 26 bp, Homo sapiens
acatgttataaaagataagtattaca

SEQ ID NO: 123399 - DNA, 26 bp, Homo sapiens
catgttataaaagataagtattacag

SEQ ID NO: 123400 - DNA, 26 bp, Homo sapiens
atgttataaaagataagtattacagc

SEQ ID NO: 123401 - DNA, 26 bp, Homo sapiens
tgttataaaagataagtattacagca

SEQ ID NO: 123402 - DNA, 26 bp, Homo sapiens
gttataaaagataagtattacagcat

SEQ ID NO: 123403 - DNA, 26 bp, Homo sapiens
ttataaaagataagtattacagcatt

SEQ ID NO: 123404 - DNA, 26 bp, Homo sapiens
tataaaagataagtattacagcattc

SEQ ID NO: 123405 - DNA, 26 bp, Homo sapiens
ataaaagataagtattacagcattct

SEQ ID NO: 123406 - DNA, 26 bp, Homo sapiens
taaaagataagtattacagcattctt

SEQ ID NO: 123407 - DNA, 26 bp, Homo sapiens
aaaagataagtattacagcattctta

SEQ ID NO: 123408 - DNA, 26 bp, Homo sapiens
aaagataagtattacagcattcttaa

SEQ ID NO: 123409 - DNA, 26 bp, Homo sapiens
aagataagtattacagcattcttaag

SEQ ID NO: 123410 - DNA, 26 bp, Homo sapiens
agataagtattacagcattcttaagt

SEQ ID NO: 123411 - DNA, 26 bp, Homo sapiens
gataagtattacagcattcttaagta

SEQ ID NO: 123412 - DNA, 26 bp, Homo sapiens
ataagtattacagcattcttaagtat

SEQ ID NO: 123413 - DNA, 26 bp, Homo sapiens
taagtattacagcattcttaagtatg

SEQ ID NO: 123414 - DNA, 26 bp, Homo sapiens
aagtattacagcattcttaagtatgg

SEQ ID NO: 123415 - DNA, 26 bp, Homo sapiens
agtattacagcattcttaagtatggt

SEQ ID NO: 123416 - DNA, 26 bp, Homo sapiens
gtattacagcattcttaagtatggta

SEQ ID NO: 123417 - DNA, 26 bp, Homo sapiens
tattacagcattcttaagtatggtac

SEQ ID NO: 123418 - DNA, 26 bp, Homo sapiens
attacagcattcttaagtatggtact

SEQ ID NO: 123419 - DNA, 26 bp, Homo sapiens
ttacagcattcttaagtatggtactt

SEQ ID NO: 123420 - DNA, 26 bp, Homo sapiens
tacagcattcttaagtatggtacttt

SEQ ID NO: 123421 - DNA, 26 bp, Homo sapiens
acagcattcttaagtatggtacttta

SEQ ID NO: 123422 - DNA, 26 bp, Homo sapiens
cagcattcttaagtatggtactttat

SEQ ID NO: 123423 - DNA, 26 bp, Homo sapiens
agcattcttaagtatggtactttata

SEQ ID NO: 123424 - DNA, 26 bp, Homo sapiens
gcattcttaagtatggtactttataa

SEQ ID NO: 123425 - DNA, 26 bp, Homo sapiens
cattcttaagtatggtactttataaa

SEQ ID NO: 123426 - DNA, 26 bp, Homo sapiens
attcttaagtatggtactttataaaa

SEQ ID NO: 123427 - DNA, 26 bp, Homo sapiens
ttcttaagtatggtactttataaaat

SEQ ID NO: 123428 - DNA, 26 bp, Homo sapiens
tcttaagtatggtactttataaaatg

SEQ ID NO: 123429 - DNA, 26 bp, Homo sapiens
cttaagtatggtactttataaaatga

SEQ ID NO: 123430 - DNA, 26 bp, Homo sapiens
ttaagtatggtactttataaaatgaa

SEQ ID NO: 123431 - DNA, 26 bp, Homo sapiens
taagtatggtactttataaaatgaaa

SEQ ID NO: 123432 - DNA, 26 bp, Homo sapiens
aagtatggtactttataaaatgaaaa

SEQ ID NO: 123433 - DNA, 26 bp, Homo sapiens
agtatggtactttataaaatgaaaac

SEQ ID NO: 123434 - DNA, 26 bp, Homo sapiens
gtatggtactttataaaatgaaaacc

SEQ ID NO: 123435 - DNA, 26 bp, Homo sapiens
tatggtactttataaaatgaaaaccg

SEQ ID NO: 123436 - DNA, 26 bp, Homo sapiens
atggtactttataaaatgaaaaccgg

SEQ ID NO: 123437 - DNA, 26 bp, Homo sapiens
tggtactttataaaatgaaaaccggg

SEQ ID NO: 123438 - DNA, 26 bp, Homo sapiens
ggtactttataaaatgaaaaccggga

SEQ ID NO: 123439 - DNA, 26 bp, Homo sapiens
gtactttataaaatgaaaaccgggat

SEQ ID NO: 123440 - DNA, 26 bp, Homo sapiens
tactttataaaatgaaaaccgggatg

SEQ ID NO: 123441 - DNA, 26 bp, Homo sapiens
actttataaaatgaaaaccgggatgc

SEQ ID NO: 123442 - DNA, 26 bp, Homo sapiens
ctttataaaatgaaaaccgggatgct

SEQ ID NO: 123443 - DNA, 26 bp, Homo sapiens
tttataaaatgaaaaccgggatgctg

SEQ ID NO: 123444 - DNA, 26 bp, Homo sapiens
ttataaaatgaaaaccgggatgctgt

SEQ ID NO: 123445 - DNA, 26 bp, Homo sapiens
tataaaatgaaaaccgggatgctgtc

SEQ ID NO: 123446 - DNA, 26 bp, Homo sapiens
ataaaatgaaaaccgggatgctgtct

SEQ ID NO: 123447 - DNA, 26 bp, Homo sapiens
taaaatgaaaaccgggatgctgtctt

SEQ ID NO: 123448 - DNA, 26 bp, Homo sapiens
aaaatgaaaaccgggatgctgtcttc

SEQ ID NO: 123449 - DNA, 26 bp, Homo sapiens
aaatgaaaaccgggatgctgtcttct

SEQ ID NO: 123450 - DNA, 26 bp, Homo sapiens
aatgaaaaccgggatgctgtcttctg

SEQ ID NO: 123451 - DNA, 26 bp, Homo sapiens
atgaaaaccgggatgctgtcttctga

SEQ ID NO: 123452 - DNA, 26 bp, Homo sapiens
tgaaaaccgggatgctgtcttctgag

SEQ ID NO: 123453 - DNA, 26 bp, Homo sapiens
gaaaaccgggatgctgtcttctgaga

SEQ ID NO: 123454 - DNA, 26 bp, Homo sapiens
aaaaccgggatgctgtcttctgagat

SEQ ID NO: 123455 - DNA, 26 bp, Homo sapiens
aaaccgggatgctgtcttctgagata

SEQ ID NO: 123456 - DNA, 26 bp, Homo sapiens
aaccgggatgctgtcttctgagatat

SEQ ID NO: 123457 - DNA, 26 bp, Homo sapiens
accgggatgctgtcttctgagatatc

SEQ ID NO: 123458 - DNA, 26 bp, Homo sapiens
ccgggatgctgtcttctgagatatca

SEQ ID NO: 123459 - DNA, 26 bp, Homo sapiens
cgggatgctgtcttctgagatatcaa

SEQ ID NO: 123460 - DNA, 26 bp, Homo sapiens
gggatgctgtcttctgagatatcaac

SEQ ID NO: 123461 - DNA, 26 bp, Homo sapiens
ggatgctgtcttctgagatatcaaca

SEQ ID NO: 123462 - DNA, 26 bp, Homo sapiens
gatgctgtcttctgagatatcaacat

SEQ ID NO: 123463 - DNA, 26 bp, Homo sapiens
atgctgtcttctgagatatcaacata

SEQ ID NO: 123464 - DNA, 26 bp, Homo sapiens
tgctgtcttctgagatatcaacatat

SEQ ID NO: 123465 - DNA, 26 bp, Homo sapiens
gctgtcttctgagatatcaacatatt

SEQ ID NO: 123466 - DNA, 26 bp, Homo sapiens
ctgtcttctgagatatcaacatattt

SEQ ID NO: 123467 - DNA, 26 bp, Homo sapiens
tgtcttctgagatatcaacatattta

SEQ ID NO: 123468 - DNA, 26 bp, Homo sapiens
gtcttctgagatatcaacatatttat

SEQ ID NO: 123469 - DNA, 26 bp, Homo sapiens
tcttctgagatatcaacatatttata

SEQ ID NO: 123470 - DNA, 26 bp, Homo sapiens
cttctgagatatcaacatatttataa

SEQ ID NO: 123471 - DNA, 26 bp, Homo sapiens
ttctgagatatcaacatatttataag

SEQ ID NO: 123472 - DNA, 26 bp, Homo sapiens
tctgagatatcaacatatttataagg

SEQ ID NO: 123473 - DNA, 26 bp, Homo sapiens
ctgagatatcaacatatttataagga

SEQ ID NO: 123474 - DNA, 26 bp, Homo sapiens
tgagatatcaacatatttataaggag

SEQ ID NO: 123475 - DNA, 26 bp, Homo sapiens
gagatatcaacatatttataaggagc

SEQ ID NO: 123476 - DNA, 26 bp, Homo sapiens
agatatcaacatatttataaggagca

SEQ ID NO: 123477 - DNA, 26 bp, Homo sapiens
gatatcaacatatttataaggagcac

SEQ ID NO: 123478 - DNA, 26 bp, Homo sapiens
atatcaacatatttataaggagcaca

SEQ ID NO: 123479 - DNA, 26 bp, Homo sapiens
tatcaacatatttataaggagcacat

SEQ ID NO: 123480 - DNA, 26 bp, Homo sapiens
atcaacatatttataaggagcacatg

SEQ ID NO: 123481 - DNA, 26 bp, Homo sapiens
tcaacatatttataaggagcacatgc

SEQ ID NO: 123482 - DNA, 26 bp, Homo sapiens
caacatatttataaggagcacatgct

SEQ ID NO: 123483 - DNA, 26 bp, Homo sapiens
aacatatttataaggagcacatgcta

SEQ ID NO: 123484 - DNA, 26 bp, Homo sapiens
acatatttataaggagcacatgctat

SEQ ID NO: 123485 - DNA, 26 bp, Homo sapiens
catatttataaggagcacatgctatg

SEQ ID NO: 123486 - DNA, 26 bp, Homo sapiens
atatttataaggagcacatgctatgt

SEQ ID NO: 123487 - DNA, 26 bp, Homo sapiens
tatttataaggagcacatgctatgtg

SEQ ID NO: 123488 - DNA, 26 bp, Homo sapiens
atttataaggagcacatgctatgtga

SEQ ID NO: 123489 - DNA, 26 bp, Homo sapiens
tttataaggagcacatgctatgtgac

SEQ ID NO: 123490 - DNA, 26 bp, Homo sapiens
ttataaggagcacatgctatgtgaca

SEQ ID NO: 123491 - DNA, 26 bp, Homo sapiens
tataaggagcacatgctatgtgacat

SEQ ID NO: 123492 - DNA, 26 bp, Homo sapiens
ataaggagcacatgctatgtgacata

SEQ ID NO: 123493 - DNA, 26 bp, Homo sapiens
taaggagcacatgctatgtgacatac

SEQ ID NO: 123494 - DNA, 26 bp, Homo sapiens
aaggagcacatgctatgtgacatact

SEQ ID NO: 123495 - DNA, 26 bp, Homo sapiens
aggagcacatgctatgtgacatactt

SEQ ID NO: 123496 - DNA, 26 bp, Homo sapiens
ggagcacatgctatgtgacatacttc

SEQ ID NO: 123497 - DNA, 26 bp, Homo sapiens
gagcacatgctatgtgacatacttca

SEQ ID NO: 123498 - DNA, 26 bp, Homo sapiens
agcacatgctatgtgacatacttcag

SEQ ID NO: 123499 - DNA, 26 bp, Homo sapiens
gcacatgctatgtgacatacttcagg

SEQ ID NO: 123500 - DNA, 26 bp, Homo sapiens
cacatgctatgtgacatacttcagga

SEQ ID NO: 123501 - DNA, 26 bp, Homo sapiens
acatgctatgtgacatacttcaggat

SEQ ID NO: 123502 - DNA, 26 bp, Homo sapiens
catgctatgtgacatacttcaggatg

SEQ ID NO: 123503 - DNA, 26 bp, Homo sapiens
atgctatgtgacatacttcaggatgc

SEQ ID NO: 123504 - DNA, 26 bp, Homo sapiens
tgctatgtgacatacttcaggatgcc

SEQ ID NO: 123505 - DNA, 26 bp, Homo sapiens
gctatgtgacatacttcaggatgcca

SEQ ID NO: 123506 - DNA, 26 bp, Homo sapiens
ctatgtgacatacttcaggatgccaa

SEQ ID NO: 123507 - DNA, 26 bp, Homo sapiens
tatgtgacatacttcaggatgccaag

SEQ ID NO: 123508 - DNA, 26 bp, Homo sapiens
atgtgacatacttcaggatgccaaga

SEQ ID NO: 123509 - DNA, 26 bp, Homo sapiens
tgtgacatacttcaggatgccaagaa

SEQ ID NO: 123510 - DNA, 26 bp, Homo sapiens
gtgacatacttcaggatgccaagaat

SEQ ID NO: 123511 - DNA, 26 bp, Homo sapiens
tgacatacttcaggatgccaagaatt

SEQ ID NO: 123512 - DNA, 26 bp, Homo sapiens
gacatacttcaggatgccaagaattt

SEQ ID NO: 123513 - DNA, 26 bp, Homo sapiens
acatacttcaggatgccaagaatttt

SEQ ID NO: 123514 - DNA, 26 bp, Homo sapiens
catacttcaggatgccaagaatttta

SEQ ID NO: 123515 - DNA, 26 bp, Homo sapiens
atacttcaggatgccaagaattttaa

SEQ ID NO: 123516 - DNA, 26 bp, Homo sapiens
tacttcaggatgccaagaattttaat

SEQ ID NO: 123517 - DNA, 26 bp, Homo sapiens
acttcaggatgccaagaattttaatt

SEQ ID NO: 123518 - DNA, 26 bp, Homo sapiens
cttcaggatgccaagaattttaatta

SEQ ID NO: 123519 - DNA, 26 bp, Homo sapiens
ttcaggatgccaagaattttaattaa

SEQ ID NO: 123520 - DNA, 26 bp, Homo sapiens
tcaggatgccaagaattttaattaaa

SEQ ID NO: 123521 - DNA, 26 bp, Homo sapiens
caggatgccaagaattttaattaaaa

SEQ ID NO: 123522 - DNA, 26 bp, Homo sapiens
aggatgccaagaattttaattaaaac

SEQ ID NO: 123523 - DNA, 26 bp, Homo sapiens
ggatgccaagaattttaattaaaact

SEQ ID NO: 123524 - DNA, 26 bp, Homo sapiens
gatgccaagaattttaattaaaactc

SEQ ID NO: 123525 - DNA, 26 bp, Homo sapiens
atgccaagaattttaattaaaactca

SEQ ID NO: 123526 - DNA, 26 bp, Homo sapiens
tgccaagaattttaattaaaactcaa

SEQ ID NO: 123527 - DNA, 26 bp, Homo sapiens
gccaagaattttaattaaaactcaac

SEQ ID NO: 123528 - DNA, 26 bp, Homo sapiens
ccaagaattttaattaaaactcaact

SEQ ID NO: 123529 - DNA, 26 bp, Homo sapiens
caagaattttaattaaaactcaactt

SEQ ID NO: 123530 - DNA, 26 bp, Homo sapiens
aagaattttaattaaaactcaacttc

SEQ ID NO: 123531 - DNA, 26 bp, Homo sapiens
agaattttaattaaaactcaacttct

SEQ ID NO: 123532 - DNA, 26 bp, Homo sapiens
gaattttaattaaaactcaacttcta

SEQ ID NO: 123533 - DNA, 26 bp, Homo sapiens
aattttaattaaaactcaacttctat

SEQ ID NO: 123534 - DNA, 26 bp, Homo sapiens
attttaattaaaactcaacttctata

SEQ ID NO: 123535 - DNA, 26 bp, Homo sapiens
ttttaattaaaactcaacttctataa

SEQ ID NO: 123536 - DNA, 26 bp, Homo sapiens
tttaattaaaactcaacttctataaa

SEQ ID NO: 123537 - DNA, 26 bp, Homo sapiens
ttaattaaaactcaacttctataaag

SEQ ID NO: 123538 - DNA, 26 bp, Homo sapiens
taattaaaactcaacttctataaagt

SEQ ID NO: 123539 - DNA, 26 bp, Homo sapiens
aattaaaactcaacttctataaagtg

SEQ ID NO: 123540 - DNA, 26 bp, Homo sapiens
attaaaactcaacttctataaagtga

SEQ ID NO: 123541 - DNA, 26 bp, Homo sapiens
ttaaaactcaacttctataaagtgaa

SEQ ID NO: 123542 - DNA, 26 bp, Homo sapiens
taaaactcaacttctataaagtgaat

SEQ ID NO: 123543 - DNA, 26 bp, Homo sapiens
aaaactcaacttctataaagtgaata

SEQ ID NO: 123544 - DNA, 26 bp, Homo sapiens
aaactcaacttctataaagtgaatat

SEQ ID NO: 123545 - DNA, 26 bp, Homo sapiens
aactcaacttctataaagtgaatata

SEQ ID NO: 123546 - DNA, 26 bp, Homo sapiens
actcaacttctataaagtgaatataa

SEQ ID NO: 123547 - DNA, 26 bp, Homo sapiens
ctcaacttctataaagtgaatataaa

SEQ ID NO: 123548 - DNA, 26 bp, Homo sapiens
tcaacttctataaagtgaatataaag

SEQ ID NO: 123549 - DNA, 26 bp, Homo sapiens
caacttctataaagtgaatataaagc

SEQ ID NO: 123550 - DNA, 26 bp, Homo sapiens
aacttctataaagtgaatataaagct

SEQ ID NO: 123551 - DNA, 26 bp, Homo sapiens
acttctataaagtgaatataaagcta

SEQ ID NO: 123552 - DNA, 26 bp, Homo sapiens
cttctataaagtgaatataaagctaa

SEQ ID NO: 123553 - DNA, 26 bp, Homo sapiens
ttctataaagtgaatataaagctaat

SEQ ID NO: 123554 - DNA, 26 bp, Homo sapiens
tctataaagtgaatataaagctaata

SEQ ID NO: 123555 - DNA, 26 bp, Homo sapiens
ctataaagtgaatataaagctaataa

SEQ ID NO: 123556 - DNA, 26 bp, Homo sapiens
tataaagtgaatataaagctaataag

SEQ ID NO: 123557 - DNA, 26 bp, Homo sapiens
ataaagtgaatataaagctaataaga

SEQ ID NO: 123558 - DNA, 26 bp, Homo sapiens
taaagtgaatataaagctaataagag

SEQ ID NO: 123559 - DNA, 26 bp, Homo sapiens
aaagtgaatataaagctaataagagg

SEQ ID NO: 123560 - DNA, 26 bp, Homo sapiens
aagtgaatataaagctaataagagga

SEQ ID NO: 123561 - DNA, 26 bp, Homo sapiens
agtgaatataaagctaataagaggaa

SEQ ID NO: 123562 - DNA, 26 bp, Homo sapiens
gtgaatataaagctaataagaggaat

SEQ ID NO: 123563 - DNA, 26 bp, Homo sapiens
tgaatataaagctaataagaggaata

SEQ ID NO: 123564 - DNA, 26 bp, Homo sapiens
gaatataaagctaataagaggaatat

SEQ ID NO: 123565 - DNA, 26 bp, Homo sapiens
aatataaagctaataagaggaatatt

SEQ ID NO: 123566 - DNA, 26 bp, Homo sapiens
atataaagctaataagaggaatattt

SEQ ID NO: 123567 - DNA, 26 bp, Homo sapiens
tataaagctaataagaggaatatttt

SEQ ID NO: 123568 - DNA, 26 bp, Homo sapiens
ataaagctaataagaggaatattttt

SEQ ID NO: 123569 - DNA, 26 bp, Homo sapiens
taaagctaataagaggaatattttta

SEQ ID NO: 123570 - DNA, 26 bp, Homo sapiens
aaagctaataagaggaatatttttaa

SEQ ID NO: 123571 - DNA, 26 bp, Homo sapiens
aagctaataagaggaatatttttaaa

SEQ ID NO: 123572 - DNA, 26 bp, Homo sapiens
agctaataagaggaatatttttaaag

SEQ ID NO: 123573 - DNA, 26 bp, Homo sapiens
gctaataagaggaatatttttaaagg

SEQ ID NO: 123574 - DNA, 26 bp, Homo sapiens
ctaataagaggaatatttttaaaggt

SEQ ID NO: 123575 - DNA, 26 bp, Homo sapiens
taataagaggaatatttttaaaggtt

SEQ ID NO: 123576 - DNA, 26 bp, Homo sapiens
aataagaggaatatttttaaaggttg

SEQ ID NO: 123577 - DNA, 26 bp, Homo sapiens
ataagaggaatatttttaaaggttgg

SEQ ID NO: 123578 - DNA, 26 bp, Homo sapiens
taagaggaatatttttaaaggttggg

SEQ ID NO: 123579 - DNA, 26 bp, Homo sapiens
aagaggaatatttttaaaggttggga

SEQ ID NO: 123580 - DNA, 26 bp, Homo sapiens
agaggaatatttttaaaggttgggat

SEQ ID NO: 123581 - DNA, 26 bp, Homo sapiens
gaggaatatttttaaaggttgggata

SEQ ID NO: 123582 - DNA, 26 bp, Homo sapiens
aggaatatttttaaaggttgggatat

SEQ ID NO: 123583 - DNA, 26 bp, Homo sapiens
ggaatatttttaaaggttgggatatg

SEQ ID NO: 123584 - DNA, 26 bp, Homo sapiens
gaatatttttaaaggttgggatatgt

SEQ ID NO: 123585 - DNA, 26 bp, Homo sapiens
aatatttttaaaggttgggatatgta

SEQ ID NO: 123586 - DNA, 26 bp, Homo sapiens
atatttttaaaggttgggatatgtaa

SEQ ID NO: 123587 - DNA, 26 bp, Homo sapiens
tatttttaaaggttgggatatgtaaa

SEQ ID NO: 123588 - DNA, 26 bp, Homo sapiens
atttttaaaggttgggatatgtaaac

SEQ ID NO: 123589 - DNA, 26 bp, Homo sapiens
tttttaaaggttgggatatgtaaact

SEQ ID NO: 123590 - DNA, 26 bp, Homo sapiens
ttttaaaggttgggatatgtaaacta

SEQ ID NO: 123591 - DNA, 26 bp, Homo sapiens
tttaaaggttgggatatgtaaactac

SEQ ID NO: 123592 - DNA, 26 bp, Homo sapiens
ttaaaggttgggatatgtaaactaca

SEQ ID NO: 123593 - DNA, 26 bp, Homo sapiens
taaaggttgggatatgtaaactacaa

SEQ ID NO: 123594 - DNA, 26 bp, Homo sapiens
aaaggttgggatatgtaaactacaat

SEQ ID NO: 123595 - DNA, 26 bp, Homo sapiens
aaggttgggatatgtaaactacaata

SEQ ID NO: 123596 - DNA, 26 bp, Homo sapiens
aggttgggatatgtaaactacaatag

SEQ ID NO: 123597 - DNA, 26 bp, Homo sapiens
ggttgggatatgtaaactacaatagc

SEQ ID NO: 123598 - DNA, 26 bp, Homo sapiens
gttgggatatgtaaactacaatagca

SEQ ID NO: 123599 - DNA, 26 bp, Homo sapiens
ttgggatatgtaaactacaatagcag

SEQ ID NO: 123600 - DNA, 26 bp, Homo sapiens
tgggatatgtaaactacaatagcagc

SEQ ID NO: 123601 - DNA, 26 bp, Homo sapiens
gggatatgtaaactacaatagcagca

SEQ ID NO: 123602 - DNA, 26 bp, Homo sapiens
ggatatgtaaactacaatagcagcag

SEQ ID NO: 123603 - DNA, 26 bp, Homo sapiens
gatatgtaaactacaatagcagcagt

SEQ ID NO: 123604 - DNA, 26 bp, Homo sapiens
atatgtaaactacaatagcagcagtt

SEQ ID NO: 123605 - DNA, 26 bp, Homo sapiens
tatgtaaactacaatagcagcagttt

SEQ ID NO: 123606 - DNA, 26 bp, Homo sapiens
atgtaaactacaatagcagcagtttg

SEQ ID NO: 123607 - DNA, 26 bp, Homo sapiens
tgtaaactacaatagcagcagtttga

SEQ ID NO: 123608 - DNA, 26 bp, Homo sapiens
gtaaactacaatagcagcagtttgaa

SEQ ID NO: 123609 - DNA, 26 bp, Homo sapiens
taaactacaatagcagcagtttgaaa

SEQ ID NO: 123610 - DNA, 26 bp, Homo sapiens
aaactacaatagcagcagtttgaaac

SEQ ID NO: 123611 - DNA, 26 bp, Homo sapiens
aactacaatagcagcagtttgaaaca

SEQ ID NO: 123612 - DNA, 26 bp, Homo sapiens
actacaatagcagcagtttgaaacag

SEQ ID NO: 123613 - DNA, 26 bp, Homo sapiens
ctacaatagcagcagtttgaaacaga

SEQ ID NO: 123614 - DNA, 26 bp, Homo sapiens
tacaatagcagcagtttgaaacagaa

SEQ ID NO: 123615 - DNA, 26 bp, Homo sapiens
acaatagcagcagtttgaaacagaag

SEQ ID NO: 123616 - DNA, 26 bp, Homo sapiens
caatagcagcagtttgaaacagaaga

SEQ ID NO: 123617 - DNA, 26 bp, Homo sapiens
aatagcagcagtttgaaacagaagag

SEQ ID NO: 123618 - DNA, 26 bp, Homo sapiens
atagcagcagtttgaaacagaagagc

SEQ ID NO: 123619 - DNA, 26 bp, Homo sapiens
tagcagcagtttgaaacagaagagca

SEQ ID NO: 123620 - DNA, 26 bp, Homo sapiens
agcagcagtttgaaacagaagagcaa

SEQ ID NO: 123621 - DNA, 26 bp, Homo sapiens
gcagcagtttgaaacagaagagcaag

SEQ ID NO: 123622 - DNA, 26 bp, Homo sapiens
cagcagtttgaaacagaagagcaaga

SEQ ID NO: 123623 - DNA, 26 bp, Homo sapiens
agcagtttgaaacagaagagcaagaa

SEQ ID NO: 123624 - DNA, 26 bp, Homo sapiens
gcagtttgaaacagaagagcaagaaa

SEQ ID NO: 123625 - DNA, 26 bp, Homo sapiens
cagtttgaaacagaagagcaagaaat

SEQ ID NO: 123626 - DNA, 26 bp, Homo sapiens
agtttgaaacagaagagcaagaaata

SEQ ID NO: 123627 - DNA, 26 bp, Homo sapiens
gtttgaaacagaagagcaagaaataa

SEQ ID NO: 123628 - DNA, 26 bp, Homo sapiens
tttgaaacagaagagcaagaaataaa

SEQ ID NO: 123629 - DNA, 26 bp, Homo sapiens
ttgaaacagaagagcaagaaataaag

SEQ ID NO: 123630 - DNA, 26 bp, Homo sapiens
tgaaacagaagagcaagaaataaagg

SEQ ID NO: 123631 - DNA, 26 bp, Homo sapiens
gaaacagaagagcaagaaataaaggg

SEQ ID NO: 123632 - DNA, 26 bp, Homo sapiens
aaacagaagagcaagaaataaaggga

SEQ ID NO: 123633 - DNA, 26 bp, Homo sapiens
aacagaagagcaagaaataaagggaa

SEQ ID NO: 123634 - DNA, 26 bp, Homo sapiens
acagaagagcaagaaataaagggaaa

SEQ ID NO: 123635 - DNA, 26 bp, Homo sapiens
cagaagagcaagaaataaagggaaat

SEQ ID NO: 123636 - DNA, 26 bp, Homo sapiens
agaagagcaagaaataaagggaaatt

SEQ ID NO: 123637 - DNA, 26 bp, Homo sapiens
gaagagcaagaaataaagggaaatta

SEQ ID NO: 123638 - DNA, 26 bp, Homo sapiens
aagagcaagaaataaagggaaattac

SEQ ID NO: 123639 - DNA, 26 bp, Homo sapiens
agagcaagaaataaagggaaattaca

SEQ ID NO: 123640 - DNA, 26 bp, Homo sapiens
gagcaagaaataaagggaaattacat

SEQ ID NO: 123641 - DNA, 26 bp, Homo sapiens
agcaagaaataaagggaaattacatt

SEQ ID NO: 123642 - DNA, 26 bp, Homo sapiens
gcaagaaataaagggaaattacatta

SEQ ID NO: 123643 - DNA, 26 bp, Homo sapiens
caagaaataaagggaaattacattac

SEQ ID NO: 123644 - DNA, 26 bp, Homo sapiens
aagaaataaagggaaattacattaca

SEQ ID NO: 123645 - DNA, 26 bp, Homo sapiens
agaaataaagggaaattacattacat

SEQ ID NO: 123646 - DNA, 26 bp, Homo sapiens
gaaataaagggaaattacattacatt

SEQ ID NO: 123647 - DNA, 26 bp, Homo sapiens
aaataaagggaaattacattacatta

SEQ ID NO: 123648 - DNA, 26 bp, Homo sapiens
aataaagggaaattacattacattag

SEQ ID NO: 123649 - DNA, 26 bp, Homo sapiens
ataaagggaaattacattacattagt

SEQ ID NO: 123650 - DNA, 26 bp, Homo sapiens
taaagggaaattacattacattagta

SEQ ID NO: 123651 - DNA, 26 bp, Homo sapiens
aaagggaaattacattacattagtat

SEQ ID NO: 123652 - DNA, 26 bp, Homo sapiens
aagggaaattacattacattagtatg

SEQ ID NO: 123653 - DNA, 26 bp, Homo sapiens
agggaaattacattacattagtatga

SEQ ID NO: 123654 - DNA, 26 bp, Homo sapiens
gggaaattacattacattagtatgaa

SEQ ID NO: 123655 - DNA, 26 bp, Homo sapiens
ggaaattacattacattagtatgaat

SEQ ID NO: 123656 - DNA, 26 bp, Homo sapiens
gaaattacattacattagtatgaatg

SEQ ID NO: 123657 - DNA, 26 bp, Homo sapiens
aaattacattacattagtatgaatgt

SEQ ID NO: 123658 - DNA, 26 bp, Homo sapiens
aattacattacattagtatgaatgta

SEQ ID NO: 123659 - DNA, 26 bp, Homo sapiens
attacattacattagtatgaatgtat

SEQ ID NO: 123660 - DNA, 26 bp, Homo sapiens
ttacattacattagtatgaatgtatt

SEQ ID NO: 123661 - DNA, 26 bp, Homo sapiens
tacattacattagtatgaatgtattc

SEQ ID NO: 123662 - DNA, 26 bp, Homo sapiens
acattacattagtatgaatgtattca

SEQ ID NO: 123663 - DNA, 26 bp, Homo sapiens
cattacattagtatgaatgtattcag

SEQ ID NO: 123664 - DNA, 26 bp, Homo sapiens
attacattagtatgaatgtattcagt

SEQ ID NO: 123665 - DNA, 26 bp, Homo sapiens
ttacattagtatgaatgtattcagta

SEQ ID NO: 123666 - DNA, 26 bp, Homo sapiens
tacattagtatgaatgtattcagtaa

SEQ ID NO: 123667 - DNA, 26 bp, Homo sapiens
acattagtatgaatgtattcagtaac

SEQ ID NO: 123668 - DNA, 26 bp, Homo sapiens
cattagtatgaatgtattcagtaact

SEQ ID NO: 123669 - DNA, 26 bp, Homo sapiens
attagtatgaatgtattcagtaactt

SEQ ID NO: 123670 - DNA, 26 bp, Homo sapiens
ttagtatgaatgtattcagtaacttc

SEQ ID NO: 123671 - DNA, 26 bp, Homo sapiens
tagtatgaatgtattcagtaacttct

SEQ ID NO: 123672 - DNA, 26 bp, Homo sapiens
agtatgaatgtattcagtaacttctg

SEQ ID NO: 123673 - DNA, 26 bp, Homo sapiens
gtatgaatgtattcagtaacttctgt

SEQ ID NO: 123674 - DNA, 26 bp, Homo sapiens
tatgaatgtattcagtaacttctgtt

SEQ ID NO: 123675 - DNA, 26 bp, Homo sapiens
atgaatgtattcagtaacttctgttg

SEQ ID NO: 123676 - DNA, 26 bp, Homo sapiens
tgaatgtattcagtaacttctgttgg

SEQ ID NO: 123677 - DNA, 26 bp, Homo sapiens
gaatgtattcagtaacttctgttgga

SEQ ID NO: 123678 - DNA, 26 bp, Homo sapiens
aatgtattcagtaacttctgttggag

SEQ ID NO: 123679 - DNA, 26 bp, Homo sapiens
atgtattcagtaacttctgttggaga

SEQ ID NO: 123680 - DNA, 26 bp, Homo sapiens
tgtattcagtaacttctgttggagat

SEQ ID NO: 123681 - DNA, 26 bp, Homo sapiens
gtattcagtaacttctgttggagatt

SEQ ID NO: 123682 - DNA, 26 bp, Homo sapiens
tattcagtaacttctgttggagatta

SEQ ID NO: 123683 - DNA, 26 bp, Homo sapiens
attcagtaacttctgttggagattat

SEQ ID NO: 123684 - DNA, 26 bp, Homo sapiens
ttcagtaacttctgttggagattatg

SEQ ID NO: 123685 - DNA, 26 bp, Homo sapiens
tcagtaacttctgttggagattatgt

SEQ ID NO: 123686 - DNA, 26 bp, Homo sapiens
cagtaacttctgttggagattatgtg

SEQ ID NO: 123687 - DNA, 26 bp, Homo sapiens
agtaacttctgttggagattatgtgt

SEQ ID NO: 123688 - DNA, 26 bp, Homo sapiens
gtaacttctgttggagattatgtgtt

SEQ ID NO: 123689 - DNA, 26 bp, Homo sapiens
taacttctgttggagattatgtgtta

SEQ ID NO: 123690 - DNA, 26 bp, Homo sapiens
aacttctgttggagattatgtgttat

SEQ ID NO: 123691 - DNA, 26 bp, Homo sapiens
acttctgttggagattatgtgttata

SEQ ID NO: 123692 - DNA, 26 bp, Homo sapiens
cttctgttggagattatgtgttatat

SEQ ID NO: 123693 - DNA, 26 bp, Homo sapiens
ttctgttggagattatgtgttatata

SEQ ID NO: 123694 - DNA, 26 bp, Homo sapiens
tctgttggagattatgtgttatatat

SEQ ID NO: 123695 - DNA, 26 bp, Homo sapiens
ctgttggagattatgtgttatatatg

SEQ ID NO: 123696 - DNA, 26 bp, Homo sapiens
tgttggagattatgtgttatatatgc

SEQ ID NO: 123697 - DNA, 26 bp, Homo sapiens
gttggagattatgtgttatatatgca

SEQ ID NO: 123698 - DNA, 26 bp, Homo sapiens
ttggagattatgtgttatatatgcac

SEQ ID NO: 123699 - DNA, 26 bp, Homo sapiens
tggagattatgtgttatatatgcaca

SEQ ID NO: 123700 - DNA, 26 bp, Homo sapiens
ggagattatgtgttatatatgcacaa

SEQ ID NO: 123701 - DNA, 26 bp, Homo sapiens
gagattatgtgttatatatgcacaat

SEQ ID NO: 123702 - DNA, 26 bp, Homo sapiens
agattatgtgttatatatgcacaatt

SEQ ID NO: 123703 - DNA, 26 bp, Homo sapiens
gattatgtgttatatatgcacaattc

SEQ ID NO: 123704 - DNA, 26 bp, Homo sapiens
attatgtgttatatatgcacaattct

SEQ ID NO: 123705 - DNA, 26 bp, Homo sapiens
ttatgtgttatatatgcacaattcta

SEQ ID NO: 123706 - DNA, 26 bp, Homo sapiens
tatgtgttatatatgcacaattctag

SEQ ID NO: 123707 - DNA, 26 bp, Homo sapiens
atgtgttatatatgcacaattctagt

SEQ ID NO: 123708 - DNA, 26 bp, Homo sapiens
tgtgttatatatgcacaattctagtt

SEQ ID NO: 123709 - DNA, 26 bp, Homo sapiens
gtgttatatatgcacaattctagtta

SEQ ID NO: 123710 - DNA, 26 bp, Homo sapiens
tgttatatatgcacaattctagttat

SEQ ID NO: 123711 - DNA, 26 bp, Homo sapiens
gttatatatgcacaattctagttatt

SEQ ID NO: 123712 - DNA, 26 bp, Homo sapiens
ttatatatgcacaattctagttattt

SEQ ID NO: 123713 - DNA, 26 bp, Homo sapiens
tatatatgcacaattctagttatttt

SEQ ID NO: 123714 - DNA, 26 bp, Homo sapiens
atatatgcacaattctagttattttt

SEQ ID NO: 123715 - DNA, 26 bp, Homo sapiens
tatatgcacaattctagttatttttc

SEQ ID NO: 123716 - DNA, 26 bp, Homo sapiens
atatgcacaattctagttatttttca

SEQ ID NO: 123717 - DNA, 26 bp, Homo sapiens
tatgcacaattctagttatttttcaa

SEQ ID NO: 123718 - DNA, 26 bp, Homo sapiens
atgcacaattctagttatttttcaat

SEQ ID NO: 123719 - DNA, 26 bp, Homo sapiens
tgcacaattctagttatttttcaatc

SEQ ID NO: 123720 - DNA, 26 bp, Homo sapiens
gcacaattctagttatttttcaatca

SEQ ID NO: 123721 - DNA, 26 bp, Homo sapiens
cacaattctagttatttttcaatcaa

SEQ ID NO: 123722 - DNA, 26 bp, Homo sapiens
acaattctagttatttttcaatcaat

SEQ ID NO: 123723 - DNA, 26 bp, Homo sapiens
caattctagttatttttcaatcaatg

SEQ ID NO: 123724 - DNA, 26 bp, Homo sapiens
aattctagttatttttcaatcaatgc

SEQ ID NO: 123725 - DNA, 26 bp, Homo sapiens
attctagttatttttcaatcaatgct

SEQ ID NO: 123726 - DNA, 26 bp, Homo sapiens
ttctagttatttttcaatcaatgctt

SEQ ID NO: 123727 - DNA, 26 bp, Homo sapiens
tctagttatttttcaatcaatgcttt

SEQ ID NO: 123728 - DNA, 26 bp, Homo sapiens
ctagttatttttcaatcaatgcttta

SEQ ID NO: 123729 - DNA, 26 bp, Homo sapiens
tagttatttttcaatcaatgctttat

SEQ ID NO: 123730 - DNA, 26 bp, Homo sapiens
agttatttttcaatcaatgctttata

SEQ ID NO: 123731 - DNA, 26 bp, Homo sapiens
gttatttttcaatcaatgctttatag

SEQ ID NO: 123732 - DNA, 26 bp, Homo sapiens
ttatttttcaatcaatgctttatagg

SEQ ID NO: 123733 - DNA, 26 bp, Homo sapiens
tatttttcaatcaatgctttataggc

SEQ ID NO: 123734 - DNA, 26 bp, Homo sapiens
atttttcaatcaatgctttataggca

SEQ ID NO: 123735 - DNA, 26 bp, Homo sapiens
tttttcaatcaatgctttataggcat

SEQ ID NO: 123736 - DNA, 26 bp, Homo sapiens
ttttcaatcaatgctttataggcata

SEQ ID NO: 123737 - DNA, 26 bp, Homo sapiens
tttcaatcaatgctttataggcataa

SEQ ID NO: 123738 - DNA, 26 bp, Homo sapiens
ttcaatcaatgctttataggcataaa

SEQ ID NO: 123739 - DNA, 26 bp, Homo sapiens
tcaatcaatgctttataggcataaat

SEQ ID NO: 123740 - DNA, 26 bp, Homo sapiens
caatcaatgctttataggcataaatt

SEQ ID NO: 123741 - DNA, 26 bp, Homo sapiens
aatcaatgctttataggcataaattg

SEQ ID NO: 123742 - DNA, 26 bp, Homo sapiens
atcaatgctttataggcataaattga

SEQ ID NO: 123743 - DNA, 26 bp, Homo sapiens
tcaatgctttataggcataaattgaa

SEQ ID NO: 123744 - DNA, 26 bp, Homo sapiens
caatgctttataggcataaattgaaa

SEQ ID NO: 123745 - DNA, 26 bp, Homo sapiens
aatgctttataggcataaattgaaat

SEQ ID NO: 123746 - DNA, 26 bp, Homo sapiens
atgctttataggcataaattgaaatt

SEQ ID NO: 123747 - DNA, 26 bp, Homo sapiens
tgctttataggcataaattgaaatta

SEQ ID NO: 123748 - DNA, 26 bp, Homo sapiens
gctttataggcataaattgaaattac

SEQ ID NO: 123749 - DNA, 26 bp, Homo sapiens
ctttataggcataaattgaaattacc

SEQ ID NO: 123750 - DNA, 26 bp, Homo sapiens
tttataggcataaattgaaattacct

SEQ ID NO: 123751 - DNA, 26 bp, Homo sapiens
ttataggcataaattgaaattacctg

SEQ ID NO: 123752 - DNA, 26 bp, Homo sapiens
tataggcataaattgaaattacctga

SEQ ID NO: 123753 - DNA, 26 bp, Homo sapiens
ataggcataaattgaaattacctgat

SEQ ID NO: 123754 - DNA, 26 bp, Homo sapiens
taggcataaattgaaattacctgata

SEQ ID NO: 123755 - DNA, 26 bp, Homo sapiens
aggcataaattgaaattacctgatat

SEQ ID NO: 123756 - DNA, 26 bp, Homo sapiens
ggcataaattgaaattacctgatatt

SEQ ID NO: 123757 - DNA, 26 bp, Homo sapiens
gcataaattgaaattacctgatatta

SEQ ID NO: 123758 - DNA, 26 bp, Homo sapiens
cataaattgaaattacctgatattaa

SEQ ID NO: 123759 - DNA, 26 bp, Homo sapiens
ataaattgaaattacctgatattaaa

SEQ ID NO: 123760 - DNA, 26 bp, Homo sapiens
taaattgaaattacctgatattaaaa

SEQ ID NO: 123761 - DNA, 26 bp, Homo sapiens
aaattgaaattacctgatattaaaag

SEQ ID NO: 123762 - DNA, 26 bp, Homo sapiens
aattgaaattacctgatattaaaagt

SEQ ID NO: 123763 - DNA, 26 bp, Homo sapiens
attgaaattacctgatattaaaagtt

SEQ ID NO: 123764 - DNA, 26 bp, Homo sapiens
ttgaaattacctgatattaaaagttt

SEQ ID NO: 123765 - DNA, 26 bp, Homo sapiens
tgaaattacctgatattaaaagtttc

SEQ ID NO: 123766 - DNA, 26 bp, Homo sapiens
gaaattacctgatattaaaagtttct

SEQ ID NO: 123767 - DNA, 26 bp, Homo sapiens
aaattacctgatattaaaagtttctg

SEQ ID NO: 123768 - DNA, 26 bp, Homo sapiens
aattacctgatattaaaagtttctga

SEQ ID NO: 123769 - DNA, 26 bp, Homo sapiens
attacctgatattaaaagtttctgaa

SEQ ID NO: 123770 - DNA, 26 bp, Homo sapiens
ttacctgatattaaaagtttctgaaa

SEQ ID NO: 123771 - DNA, 26 bp, Homo sapiens
tacctgatattaaaagtttctgaaat

SEQ ID NO: 123772 - DNA, 26 bp, Homo sapiens
acctgatattaaaagtttctgaaatt

SEQ ID NO: 123773 - DNA, 26 bp, Homo sapiens
cctgatattaaaagtttctgaaattc

SEQ ID NO: 123774 - DNA, 26 bp, Homo sapiens
ctgatattaaaagtttctgaaattca

SEQ ID NO: 123775 - DNA, 26 bp, Homo sapiens
tgatattaaaagtttctgaaattcac

SEQ ID NO: 123776 - DNA, 26 bp, Homo sapiens
gatattaaaagtttctgaaattcact

SEQ ID NO: 123777 - DNA, 26 bp, Homo sapiens
atattaaaagtttctgaaattcacta

SEQ ID NO: 123778 - DNA, 26 bp, Homo sapiens
tattaaaagtttctgaaattcactat

SEQ ID NO: 123779 - DNA, 26 bp, Homo sapiens
attaaaagtttctgaaattcactata

SEQ ID NO: 123780 - DNA, 26 bp, Homo sapiens
ttaaaagtttctgaaattcactatag

SEQ ID NO: 123781 - DNA, 26 bp, Homo sapiens
taaaagtttctgaaattcactataga

SEQ ID NO: 123782 - DNA, 26 bp, Homo sapiens
aaaagtttctgaaattcactatagaa

SEQ ID NO: 123783 - DNA, 26 bp, Homo sapiens
aaagtttctgaaattcactatagaaa

SEQ ID NO: 123784 - DNA, 26 bp, Homo sapiens
aagtttctgaaattcactatagaaaa

SEQ ID NO: 123785 - DNA, 26 bp, Homo sapiens
agtttctgaaattcactatagaaaat

SEQ ID NO: 123786 - DNA, 26 bp, Homo sapiens
gtttctgaaattcactatagaaaata

SEQ ID NO: 123787 - DNA, 26 bp, Homo sapiens
tttctgaaattcactatagaaaatac

SEQ ID NO: 123788 - DNA, 26 bp, Homo sapiens
ttctgaaattcactatagaaaataca

SEQ ID NO: 123789 - DNA, 26 bp, Homo sapiens
tctgaaattcactatagaaaatacac

SEQ ID NO: 123790 - DNA, 26 bp, Homo sapiens
ctgaaattcactatagaaaatacaca

SEQ ID NO: 123791 - DNA, 26 bp, Homo sapiens
tgaaattcactatagaaaatacacat

SEQ ID NO: 123792 - DNA, 26 bp, Homo sapiens
gaaattcactatagaaaatacacatg

SEQ ID NO: 123793 - DNA, 26 bp, Homo sapiens
aaattcactatagaaaatacacatga

SEQ ID NO: 123794 - DNA, 26 bp, Homo sapiens
aattcactatagaaaatacacatgag

SEQ ID NO: 123795 - DNA, 26 bp, Homo sapiens
attcactatagaaaatacacatgagc

SEQ ID NO: 123796 - DNA, 26 bp, Homo sapiens
ttcactatagaaaatacacatgagca

SEQ ID NO: 123797 - DNA, 26 bp, Homo sapiens
tcactatagaaaatacacatgagcat

SEQ ID NO: 123798 - DNA, 26 bp, Homo sapiens
cactatagaaaatacacatgagcata

SEQ ID NO: 123799 - DNA, 26 bp, Homo sapiens
actatagaaaatacacatgagcataa

SEQ ID NO: 123800 - DNA, 26 bp, Homo sapiens
ctatagaaaatacacatgagcataaa

SEQ ID NO: 123801 - DNA, 26 bp, Homo sapiens
tatagaaaatacacatgagcataaac

SEQ ID NO: 123802 - DNA, 26 bp, Homo sapiens
atagaaaatacacatgagcataaaca

SEQ ID NO: 123803 - DNA, 26 bp, Homo sapiens
tagaaaatacacatgagcataaacaa

SEQ ID NO: 123804 - DNA, 26 bp, Homo sapiens
agaaaatacacatgagcataaacaaa

SEQ ID NO: 123805 - DNA, 26 bp, Homo sapiens
gaaaatacacatgagcataaacaaat

SEQ ID NO: 123806 - DNA, 26 bp, Homo sapiens
aaaatacacatgagcataaacaaatg

SEQ ID NO: 123807 - DNA, 26 bp, Homo sapiens
aaatacacatgagcataaacaaatga

SEQ ID NO: 123808 - DNA, 26 bp, Homo sapiens
aatacacatgagcataaacaaatgag

SEQ ID NO: 123809 - DNA, 26 bp, Homo sapiens
atacacatgagcataaacaaatgagg

SEQ ID NO: 123810 - DNA, 26 bp, Homo sapiens
tacacatgagcataaacaaatgagga

SEQ ID NO: 123811 - DNA, 26 bp, Homo sapiens
acacatgagcataaacaaatgaggat

SEQ ID NO: 123812 - DNA, 26 bp, Homo sapiens
cacatgagcataaacaaatgaggata

SEQ ID NO: 123813 - DNA, 26 bp, Homo sapiens
acatgagcataaacaaatgaggatat

SEQ ID NO: 123814 - DNA, 26 bp, Homo sapiens
catgagcataaacaaatgaggatatt

SEQ ID NO: 123815 - DNA, 26 bp, Homo sapiens
atgagcataaacaaatgaggatattc

SEQ ID NO: 123816 - DNA, 26 bp, Homo sapiens
tgagcataaacaaatgaggatattct

SEQ ID NO: 123817 - DNA, 26 bp, Homo sapiens
gagcataaacaaatgaggatattctc

SEQ ID NO: 123818 - DNA, 26 bp, Homo sapiens
agcataaacaaatgaggatattctct

SEQ ID NO: 123819 - DNA, 26 bp, Homo sapiens
gcataaacaaatgaggatattctctc

SEQ ID NO: 123820 - DNA, 26 bp, Homo sapiens
cataaacaaatgaggatattctctct

SEQ ID NO: 123821 - DNA, 26 bp, Homo sapiens
ataaacaaatgaggatattctctctc

SEQ ID NO: 123822 - DNA, 26 bp, Homo sapiens
taaacaaatgaggatattctctctct

SEQ ID NO: 123823 - DNA, 26 bp, Homo sapiens
aaacaaatgaggatattctctctctc

SEQ ID NO: 123824 - DNA, 26 bp, Homo sapiens
aacaaatgaggatattctctctctcc

SEQ ID NO: 123825 - DNA, 26 bp, Homo sapiens
acaaatgaggatattctctctctcct

SEQ ID NO: 123826 - DNA, 26 bp, Homo sapiens
caaatgaggatattctctctctcctg

SEQ ID NO: 123827 - DNA, 26 bp, Homo sapiens
aaatgaggatattctctctctcctgt

SEQ ID NO: 123828 - DNA, 26 bp, Homo sapiens
aatgaggatattctctctctcctgtg

SEQ ID NO: 123829 - DNA, 26 bp, Homo sapiens
atgaggatattctctctctcctgtga

SEQ ID NO: 123830 - DNA, 26 bp, Homo sapiens
tgaggatattctctctctcctgtgaa

SEQ ID NO: 123831 - DNA, 26 bp, Homo sapiens
gaggatattctctctctcctgtgaaa

SEQ ID NO: 123832 - DNA, 26 bp, Homo sapiens
aggatattctctctctcctgtgaaaa

SEQ ID NO: 123833 - DNA, 26 bp, Homo sapiens
ggatattctctctctcctgtgaaaaa

SEQ ID NO: 123834 - DNA, 26 bp, Homo sapiens
gatattctctctctcctgtgaaaaaa

SEQ ID NO: 123835 - DNA, 26 bp, Homo sapiens
atattctctctctcctgtgaaaaaaa

SEQ ID NO: 123836 - DNA, 26 bp, Homo sapiens
tattctctctctcctgtgaaaaaaat

SEQ ID NO: 123837 - DNA, 26 bp, Homo sapiens
attctctctctcctgtgaaaaaaatg

SEQ ID NO: 123838 - DNA, 26 bp, Homo sapiens
ttctctctctcctgtgaaaaaaatgt

SEQ ID NO: 123839 - DNA, 26 bp, Homo sapiens
tctctctctcctgtgaaaaaaatgtg

SEQ ID NO: 123840 - DNA, 26 bp, Homo sapiens
ctctctctcctgtgaaaaaaatgtgt

SEQ ID NO: 123841 - DNA, 26 bp, Homo sapiens
tctctctcctgtgaaaaaaatgtgtg

SEQ ID NO: 123842 - DNA, 26 bp, Homo sapiens
ctctctcctgtgaaaaaaatgtgtgg

SEQ ID NO: 123843 - DNA, 26 bp, Homo sapiens
tctctcctgtgaaaaaaatgtgtggg

SEQ ID NO: 123844 - DNA, 26 bp, Homo sapiens
ctctcctgtgaaaaaaatgtgtgggt

SEQ ID NO: 123845 - DNA, 26 bp, Homo sapiens
tctcctgtgaaaaaaatgtgtgggta

SEQ ID NO: 123846 - DNA, 26 bp, Homo sapiens
ctcctgtgaaaaaaatgtgtgggtaa

SEQ ID NO: 123847 - DNA, 26 bp, Homo sapiens
tcctgtgaaaaaaatgtgtgggtaat

SEQ ID NO: 123848 - DNA, 26 bp, Homo sapiens
cctgtgaaaaaaatgtgtgggtaata

SEQ ID NO: 123849 - DNA, 26 bp, Homo sapiens
ctgtgaaaaaaatgtgtgggtaatat

SEQ ID NO: 123850 - DNA, 26 bp, Homo sapiens
tgtgaaaaaaatgtgtgggtaatata

SEQ ID NO: 123851 - DNA, 26 bp, Homo sapiens
gtgaaaaaaatgtgtgggtaatatat

SEQ ID NO: 123852 - DNA, 26 bp, Homo sapiens
tgaaaaaaatgtgtgggtaatatatt

SEQ ID NO: 123853 - DNA, 26 bp, Homo sapiens
gaaaaaaatgtgtgggtaatatatta

SEQ ID NO: 123854 - DNA, 26 bp, Homo sapiens
aaaaaaatgtgtgggtaatatattac

SEQ ID NO: 123855 - DNA, 26 bp, Homo sapiens
aaaaaatgtgtgggtaatatattaca

SEQ ID NO: 123856 - DNA, 26 bp, Homo sapiens
aaaaatgtgtgggtaatatattacat

SEQ ID NO: 123857 - DNA, 26 bp, Homo sapiens
aaaatgtgtgggtaatatattacatt

SEQ ID NO: 123858 - DNA, 26 bp, Homo sapiens
aaatgtgtgggtaatatattacatta

SEQ ID NO: 123859 - DNA, 26 bp, Homo sapiens
aatgtgtgggtaatatattacattac

SEQ ID NO: 123860 - DNA, 26 bp, Homo sapiens
atgtgtgggtaatatattacattaca

SEQ ID NO: 123861 - DNA, 26 bp, Homo sapiens
tgtgtgggtaatatattacattacag

SEQ ID NO: 123862 - DNA, 26 bp, Homo sapiens
gtgtgggtaatatattacattacaga

SEQ ID NO: 123863 - DNA, 26 bp, Homo sapiens
tgtgggtaatatattacattacagat

SEQ ID NO: 123864 - DNA, 26 bp, Homo sapiens
gtgggtaatatattacattacagata

SEQ ID NO: 123865 - DNA, 26 bp, Homo sapiens
tgggtaatatattacattacagatag

SEQ ID NO: 123866 - DNA, 26 bp, Homo sapiens
gggtaatatattacattacagataga

SEQ ID NO: 123867 - DNA, 26 bp, Homo sapiens
ggtaatatattacattacagatagaa

SEQ ID NO: 123868 - DNA, 26 bp, Homo sapiens
gtaatatattacattacagatagaaa

SEQ ID NO: 123869 - DNA, 26 bp, Homo sapiens
taatatattacattacagatagaaat

SEQ ID NO: 123870 - DNA, 26 bp, Homo sapiens
aatatattacattacagatagaaatt

SEQ ID NO: 123871 - DNA, 26 bp, Homo sapiens
atatattacattacagatagaaattg

SEQ ID NO: 123872 - DNA, 26 bp, Homo sapiens
tatattacattacagatagaaattgt

SEQ ID NO: 123873 - DNA, 26 bp, Homo sapiens
atattacattacagatagaaattgta

SEQ ID NO: 123874 - DNA, 26 bp, Homo sapiens
tattacattacagatagaaattgtat

SEQ ID NO: 123875 - DNA, 26 bp, Homo sapiens
attacattacagatagaaattgtata

SEQ ID NO: 123876 - DNA, 26 bp, Homo sapiens
ttacattacagatagaaattgtatac

SEQ ID NO: 123877 - DNA, 26 bp, Homo sapiens
tacattacagatagaaattgtatact

SEQ ID NO: 123878 - DNA, 26 bp, Homo sapiens
acattacagatagaaattgtatactt

SEQ ID NO: 123879 - DNA, 26 bp, Homo sapiens
cattacagatagaaattgtatacttg

SEQ ID NO: 123880 - DNA, 26 bp, Homo sapiens
attacagatagaaattgtatacttga

SEQ ID NO: 123881 - DNA, 26 bp, Homo sapiens
ttacagatagaaattgtatacttgaa

SEQ ID NO: 123882 - DNA, 26 bp, Homo sapiens
tacagatagaaattgtatacttgaaa

SEQ ID NO: 123883 - DNA, 26 bp, Homo sapiens
acagatagaaattgtatacttgaaat

SEQ ID NO: 123884 - DNA, 26 bp, Homo sapiens
cagatagaaattgtatacttgaaata

SEQ ID NO: 123885 - DNA, 26 bp, Homo sapiens
agatagaaattgtatacttgaaataa

SEQ ID NO: 123886 - DNA, 26 bp, Homo sapiens
gatagaaattgtatacttgaaataac

SEQ ID NO: 123887 - DNA, 26 bp, Homo sapiens
atagaaattgtatacttgaaataacc

SEQ ID NO: 123888 - DNA, 26 bp, Homo sapiens
tagaaattgtatacttgaaataacca

SEQ ID NO: 123889 - DNA, 26 bp, Homo sapiens
agaaattgtatacttgaaataaccat

SEQ ID NO: 123890 - DNA, 26 bp, Homo sapiens
gaaattgtatacttgaaataaccata

SEQ ID NO: 123891 - DNA, 26 bp, Homo sapiens
aaattgtatacttgaaataaccataa

SEQ ID NO: 123892 - DNA, 26 bp, Homo sapiens
aattgtatacttgaaataaccataaa

SEQ ID NO: 123893 - DNA, 26 bp, Homo sapiens
attgtatacttgaaataaccataaaa

SEQ ID NO: 123894 - DNA, 26 bp, Homo sapiens
ttgtatacttgaaataaccataaaag

SEQ ID NO: 123895 - DNA, 26 bp, Homo sapiens
tgtatacttgaaataaccataaaaga

SEQ ID NO: 123896 - DNA, 26 bp, Homo sapiens
gtatacttgaaataaccataaaagac

SEQ ID NO: 123897 - DNA, 26 bp, Homo sapiens
tatacttgaaataaccataaaagact

SEQ ID NO: 123898 - DNA, 26 bp, Homo sapiens
atacttgaaataaccataaaagactt

SEQ ID NO: 123899 - DNA, 26 bp, Homo sapiens
tacttgaaataaccataaaagactta

SEQ ID NO: 123900 - DNA, 26 bp, Homo sapiens
acttgaaataaccataaaagacttaa

SEQ ID NO: 123901 - DNA, 26 bp, Homo sapiens
cttgaaataaccataaaagacttaaa

SEQ ID NO: 123902 - DNA, 26 bp, Homo sapiens
ttgaaataaccataaaagacttaaat

SEQ ID NO: 123903 - DNA, 26 bp, Homo sapiens
tgaaataaccataaaagacttaaata

SEQ ID NO: 123904 - DNA, 26 bp, Homo sapiens
gaaataaccataaaagacttaaatag

SEQ ID NO: 123905 - DNA, 26 bp, Homo sapiens
aaataaccataaaagacttaaatagt

SEQ ID NO: 123906 - DNA, 26 bp, Homo sapiens
aataaccataaaagacttaaatagta

SEQ ID NO: 123907 - DNA, 26 bp, Homo sapiens
ataaccataaaagacttaaatagtat

SEQ ID NO: 123908 - DNA, 26 bp, Homo sapiens
taaccataaaagacttaaatagtata

SEQ ID NO: 123909 - DNA, 26 bp, Homo sapiens
aaccataaaagacttaaatagtatat

SEQ ID NO: 123910 - DNA, 26 bp, Homo sapiens
accataaaagacttaaatagtatatg

SEQ ID NO: 123911 - DNA, 26 bp, Homo sapiens
ccataaaagacttaaatagtatatgg

SEQ ID NO: 123912 - DNA, 26 bp, Homo sapiens
cataaaagacttaaatagtatatgga

SEQ ID NO: 123913 - DNA, 26 bp, Homo sapiens
ataaaagacttaaatagtatatggat

SEQ ID NO: 123914 - DNA, 26 bp, Homo sapiens
taaaagacttaaatagtatatggata

SEQ ID NO: 123915 - DNA, 26 bp, Homo sapiens
aaaagacttaaatagtatatggatac

SEQ ID NO: 123916 - DNA, 26 bp, Homo sapiens
aaagacttaaatagtatatggatact

SEQ ID NO: 123917 - DNA, 26 bp, Homo sapiens
aagacttaaatagtatatggatacta

SEQ ID NO: 123918 - DNA, 26 bp, Homo sapiens
agacttaaatagtatatggatactat

SEQ ID NO: 123919 - DNA, 26 bp, Homo sapiens
gacttaaatagtatatggatactatt

SEQ ID NO: 123920 - DNA, 26 bp, Homo sapiens
acttaaatagtatatggatactattt

SEQ ID NO: 123921 - DNA, 26 bp, Homo sapiens
cttaaatagtatatggatactatttt

SEQ ID NO: 123922 - DNA, 26 bp, Homo sapiens
ttaaatagtatatggatactattttc

SEQ ID NO: 123923 - DNA, 26 bp, Homo sapiens
taaatagtatatggatactattttca

SEQ ID NO: 123924 - DNA, 26 bp, Homo sapiens
aaatagtatatggatactattttcag

SEQ ID NO: 123925 - DNA, 26 bp, Homo sapiens
aatagtatatggatactattttcagc

SEQ ID NO: 123926 - DNA, 26 bp, Homo sapiens
atagtatatggatactattttcagca

SEQ ID NO: 123927 - DNA, 26 bp, Homo sapiens
tagtatatggatactattttcagcaa

SEQ ID NO: 123928 - DNA, 26 bp, Homo sapiens
agtatatggatactattttcagcaaa

SEQ ID NO: 123929 - DNA, 26 bp, Homo sapiens
gtatatggatactattttcagcaaaa

SEQ ID NO: 123930 - DNA, 26 bp, Homo sapiens
tatatggatactattttcagcaaaat

SEQ ID NO: 123931 - DNA, 26 bp, Homo sapiens
atatggatactattttcagcaaaatt

SEQ ID NO: 123932 - DNA, 26 bp, Homo sapiens
tatggatactattttcagcaaaattg

SEQ ID NO: 123933 - DNA, 26 bp, Homo sapiens
atggatactattttcagcaaaattgt

SEQ ID NO: 123934 - DNA, 26 bp, Homo sapiens
tggatactattttcagcaaaattgtt

SEQ ID NO: 123935 - DNA, 26 bp, Homo sapiens
ggatactattttcagcaaaattgttt

SEQ ID NO: 123936 - DNA, 26 bp, Homo sapiens
gatactattttcagcaaaattgtttc

SEQ ID NO: 123937 - DNA, 26 bp, Homo sapiens
atactattttcagcaaaattgtttca

SEQ ID NO: 123938 - DNA, 26 bp, Homo sapiens
tactattttcagcaaaattgtttcat

SEQ ID NO: 123939 - DNA, 26 bp, Homo sapiens
actattttcagcaaaattgtttcata

SEQ ID NO: 123940 - DNA, 26 bp, Homo sapiens
ctattttcagcaaaattgtttcatat

SEQ ID NO: 123941 - DNA, 26 bp, Homo sapiens
tattttcagcaaaattgtttcatatt

SEQ ID NO: 123942 - DNA, 26 bp, Homo sapiens
attttcagcaaaattgtttcatattt

SEQ ID NO: 123943 - DNA, 26 bp, Homo sapiens
ttttcagcaaaattgtttcatattta

SEQ ID NO: 123944 - DNA, 26 bp, Homo sapiens
tttcagcaaaattgtttcatatttaa

SEQ ID NO: 123945 - DNA, 26 bp, Homo sapiens
ttcagcaaaattgtttcatatttaaa

SEQ ID NO: 123946 - DNA, 26 bp, Homo sapiens
tcagcaaaattgtttcatatttaaat

SEQ ID NO: 123947 - DNA, 26 bp, Homo sapiens
cagcaaaattgtttcatatttaaatt

SEQ ID NO: 123948 - DNA, 26 bp, Homo sapiens
agcaaaattgtttcatatttaaattt

SEQ ID NO: 123949 - DNA, 26 bp, Homo sapiens
gcaaaattgtttcatatttaaattta

SEQ ID NO: 123950 - DNA, 26 bp, Homo sapiens
caaaattgtttcatatttaaatttaa

SEQ ID NO: 123951 - DNA, 26 bp, Homo sapiens
aaaattgtttcatatttaaatttaaa

SEQ ID NO: 123952 - DNA, 26 bp, Homo sapiens
aaattgtttcatatttaaatttaaac

SEQ ID NO: 123953 - DNA, 26 bp, Homo sapiens
aattgtttcatatttaaatttaaact

SEQ ID NO: 123954 - DNA, 26 bp, Homo sapiens
attgtttcatatttaaatttaaactt

SEQ ID NO: 123955 - DNA, 26 bp, Homo sapiens
ttgtttcatatttaaatttaaacttt

SEQ ID NO: 123956 - DNA, 26 bp, Homo sapiens
tgtttcatatttaaatttaaactttt

SEQ ID NO: 123957 - DNA, 26 bp, Homo sapiens
gtttcatatttaaatttaaactttta

SEQ ID NO: 123958 - DNA, 26 bp, Homo sapiens
tttcatatttaaatttaaacttttag

SEQ ID NO: 123959 - DNA, 26 bp, Homo sapiens
ttcatatttaaatttaaacttttagt

SEQ ID NO: 123960 - DNA, 26 bp, Homo sapiens
tcatatttaaatttaaacttttagtt

SEQ ID NO: 123961 - DNA, 26 bp, Homo sapiens
catatttaaatttaaacttttagtta

SEQ ID NO: 123962 - DNA, 26 bp, Homo sapiens
atatttaaatttaaacttttagttat

SEQ ID NO: 123963 - DNA, 26 bp, Homo sapiens
tatttaaatttaaacttttagttatt

SEQ ID NO: 123964 - DNA, 26 bp, Homo sapiens
atttaaatttaaacttttagttattt

SEQ ID NO: 123965 - DNA, 26 bp, Homo sapiens
tttaaatttaaacttttagttatttt

SEQ ID NO: 123966 - DNA, 26 bp, Homo sapiens
ttaaatttaaacttttagttattttt

SEQ ID NO: 123967 - DNA, 26 bp, Homo sapiens
taaatttaaacttttagttatttttt

SEQ ID NO: 123968 - DNA, 26 bp, Homo sapiens
aaatttaaacttttagttattttttc

SEQ ID NO: 123969 - DNA, 26 bp, Homo sapiens
aatttaaacttttagttattttttca

SEQ ID NO: 123970 - DNA, 26 bp, Homo sapiens
atttaaacttttagttattttttcat

SEQ ID NO: 123971 - DNA, 26 bp, Homo sapiens
tttaaacttttagttattttttcatg

SEQ ID NO: 123972 - DNA, 26 bp, Homo sapiens
ttaaacttttagttattttttcatgt

SEQ ID NO: 123973 - DNA, 26 bp, Homo sapiens
taaacttttagttattttttcatgtg

SEQ ID NO: 123974 - DNA, 26 bp, Homo sapiens
aaacttttagttattttttcatgtgt

SEQ ID NO: 123975 - DNA, 26 bp, Homo sapiens
aacttttagttattttttcatgtgtc

SEQ ID NO: 123976 - DNA, 26 bp, Homo sapiens
acttttagttattttttcatgtgtct

SEQ ID NO: 123977 - DNA, 26 bp, Homo sapiens
cttttagttattttttcatgtgtcta

SEQ ID NO: 123978 - DNA, 26 bp, Homo sapiens
ttttagttattttttcatgtgtctaa

SEQ ID NO: 123979 - DNA, 26 bp, Homo sapiens
tttagttattttttcatgtgtctaat

SEQ ID NO: 123980 - DNA, 26 bp, Homo sapiens
ttagttattttttcatgtgtctaatg

SEQ ID NO: 123981 - DNA, 26 bp, Homo sapiens
tagttattttttcatgtgtctaatgc

SEQ ID NO: 123982 - DNA, 26 bp, Homo sapiens
agttattttttcatgtgtctaatgca

SEQ ID NO: 123983 - DNA, 26 bp, Homo sapiens
gttattttttcatgtgtctaatgcaa

SEQ ID NO: 123984 - DNA, 26 bp, Homo sapiens
ttattttttcatgtgtctaatgcaag

SEQ ID NO: 123985 - DNA, 26 bp, Homo sapiens
tattttttcatgtgtctaatgcaaga

SEQ ID NO: 123986 - DNA, 26 bp, Homo sapiens
attttttcatgtgtctaatgcaagat

SEQ ID NO: 123987 - DNA, 26 bp, Homo sapiens
ttttttcatgtgtctaatgcaagatt

SEQ ID NO: 123988 - DNA, 26 bp, Homo sapiens
tttttcatgtgtctaatgcaagattt

SEQ ID NO: 123989 - DNA, 26 bp, Homo sapiens
ttttcatgtgtctaatgcaagatttc

SEQ ID NO: 123990 - DNA, 26 bp, Homo sapiens
tttcatgtgtctaatgcaagatttct

SEQ ID NO: 123991 - DNA, 26 bp, Homo sapiens
ttcatgtgtctaatgcaagatttcta

SEQ ID NO: 123992 - DNA, 26 bp, Homo sapiens
tcatgtgtctaatgcaagatttctaa

SEQ ID NO: 123993 - DNA, 26 bp, Homo sapiens
catgtgtctaatgcaagatttctaaa

SEQ ID NO: 123994 - DNA, 26 bp, Homo sapiens
atgtgtctaatgcaagatttctaaaa

SEQ ID NO: 123995 - DNA, 26 bp, Homo sapiens
tgtgtctaatgcaagatttctaaaat

SEQ ID NO: 123996 - DNA, 26 bp, Homo sapiens
gtgtctaatgcaagatttctaaaatt

SEQ ID NO: 123997 - DNA, 26 bp, Homo sapiens
tgtctaatgcaagatttctaaaattt

SEQ ID NO: 123998 - DNA, 26 bp, Homo sapiens
gtctaatgcaagatttctaaaatttt

SEQ ID NO: 123999 - DNA, 26 bp, Homo sapiens
tctaatgcaagatttctaaaattttc

SEQ ID NO: 124000 - DNA, 26 bp, Homo sapiens
ctaatgcaagatttctaaaattttca

SEQ ID NO: 124001 - DNA, 26 bp, Homo sapiens
taatgcaagatttctaaaattttcat

SEQ ID NO: 124002 - DNA, 26 bp, Homo sapiens
aatgcaagatttctaaaattttcatt

SEQ ID NO: 124003 - DNA, 26 bp, Homo sapiens
atgcaagatttctaaaattttcattt

SEQ ID NO: 124004 - DNA, 26 bp, Homo sapiens
tgcaagatttctaaaattttcatttt

SEQ ID NO: 124005 - DNA, 26 bp, Homo sapiens
gcaagatttctaaaattttcattttt

SEQ ID NO: 124006 - DNA, 26 bp, Homo sapiens
caagatttctaaaattttcatttttt

SEQ ID NO: 124007 - DNA, 26 bp, Homo sapiens
aagatttctaaaattttcatttttta

SEQ ID NO: 124008 - DNA, 26 bp, Homo sapiens
agatttctaaaattttcattttttac

SEQ ID NO: 124009 - DNA, 26 bp, Homo sapiens
gatttctaaaattttcattttttact

SEQ ID NO: 124010 - DNA, 26 bp, Homo sapiens
atttctaaaattttcattttttactt

SEQ ID NO: 124011 - DNA, 26 bp, Homo sapiens
tttctaaaattttcattttttacttt

SEQ ID NO: 124012 - DNA, 26 bp, Homo sapiens
ttctaaaattttcattttttactttt

SEQ ID NO: 124013 - DNA, 26 bp, Homo sapiens
tctaaaattttcattttttacttttt

SEQ ID NO: 124014 - DNA, 26 bp, Homo sapiens
ctaaaattttcattttttacttttta

SEQ ID NO: 124015 - DNA, 26 bp, Homo sapiens
taaaattttcattttttactttttat

SEQ ID NO: 124016 - DNA, 26 bp, Homo sapiens
aaaattttcattttttactttttata

SEQ ID NO: 124017 - DNA, 26 bp, Homo sapiens
aaattttcattttttactttttataa

SEQ ID NO: 124018 - DNA, 26 bp, Homo sapiens
aattttcattttttactttttataat

SEQ ID NO: 124019 - DNA, 26 bp, Homo sapiens
attttcattttttactttttataatg

SEQ ID NO: 124020 - DNA, 26 bp, Homo sapiens
ttttcattttttactttttataatgt

SEQ ID NO: 124021 - DNA, 26 bp, Homo sapiens
tttcattttttactttttataatgtt

SEQ ID NO: 124022 - DNA, 26 bp, Homo sapiens
ttcattttttactttttataatgtta

SEQ ID NO: 124023 - DNA, 26 bp, Homo sapiens
tcattttttactttttataatgttaa

SEQ ID NO: 124024 - DNA, 26 bp, Homo sapiens
cattttttactttttataatgttaac

SEQ ID NO: 124025 - DNA, 26 bp, Homo sapiens
attttttactttttataatgttaact

SEQ ID NO: 124026 - DNA, 26 bp, Homo sapiens
ttttttactttttataatgttaactg

SEQ ID NO: 124027 - DNA, 26 bp, Homo sapiens
tttttactttttataatgttaactga

SEQ ID NO: 124028 - DNA, 26 bp, Homo sapiens
ttttactttttataatgttaactgaa

SEQ ID NO: 124029 - DNA, 26 bp, Homo sapiens
tttactttttataatgttaactgaaa

SEQ ID NO: 124030 - DNA, 26 bp, Homo sapiens
ttactttttataatgttaactgaaaa

SEQ ID NO: 124031 - DNA, 26 bp, Homo sapiens
tactttttataatgttaactgaaaag

SEQ ID NO: 124032 - DNA, 26 bp, Homo sapiens
actttttataatgttaactgaaaagg

SEQ ID NO: 124033 - DNA, 26 bp, Homo sapiens
ctttttataatgttaactgaaaagga

SEQ ID NO: 124034 - DNA, 26 bp, Homo sapiens
tttttataatgttaactgaaaaggag

SEQ ID NO: 124035 - DNA, 26 bp, Homo sapiens
ttttataatgttaactgaaaaggagg

SEQ ID NO: 124036 - DNA, 26 bp, Homo sapiens
tttataatgttaactgaaaaggaggg

SEQ ID NO: 124037 - DNA, 26 bp, Homo sapiens
ttataatgttaactgaaaaggaggga

SEQ ID NO: 124038 - DNA, 26 bp, Homo sapiens
tataatgttaactgaaaaggagggag

SEQ ID NO: 124039 - DNA, 26 bp, Homo sapiens
ataatgttaactgaaaaggagggagt

SEQ ID NO: 124040 - DNA, 26 bp, Homo sapiens
taatgttaactgaaaaggagggagtg

SEQ ID NO: 124041 - DNA, 26 bp, Homo sapiens
aatgttaactgaaaaggagggagtgc

SEQ ID NO: 124042 - DNA, 26 bp, Homo sapiens
atgttaactgaaaaggagggagtgca

SEQ ID NO: 124043 - DNA, 26 bp, Homo sapiens
tgttaactgaaaaggagggagtgcat

SEQ ID NO: 124044 - DNA, 26 bp, Homo sapiens
gttaactgaaaaggagggagtgcatt

SEQ ID NO: 124045 - DNA, 26 bp, Homo sapiens
ttaactgaaaaggagggagtgcattt

SEQ ID NO: 124046 - DNA, 26 bp, Homo sapiens
taactgaaaaggagggagtgcattta

SEQ ID NO: 124047 - DNA, 26 bp, Homo sapiens
aactgaaaaggagggagtgcatttaa

SEQ ID NO: 124048 - DNA, 26 bp, Homo sapiens
actgaaaaggagggagtgcatttaac

SEQ ID NO: 124049 - DNA, 26 bp, Homo sapiens
ctgaaaaggagggagtgcatttaaca

SEQ ID NO: 124050 - DNA, 26 bp, Homo sapiens
tgaaaaggagggagtgcatttaacat

SEQ ID NO: 124051 - DNA, 26 bp, Homo sapiens
gaaaaggagggagtgcatttaacata

SEQ ID NO: 124052 - DNA, 26 bp, Homo sapiens
aaaaggagggagtgcatttaacataa

SEQ ID NO: 124053 - DNA, 26 bp, Homo sapiens
aaaggagggagtgcatttaacataaa

SEQ ID NO: 124054 - DNA, 26 bp, Homo sapiens
aaggagggagtgcatttaacataaaa

SEQ ID NO: 124055 - DNA, 26 bp, Homo sapiens
aggagggagtgcatttaacataaaaa

SEQ ID NO: 124056 - DNA, 26 bp, Homo sapiens
ggagggagtgcatttaacataaaaac

SEQ ID NO: 124057 - DNA, 26 bp, Homo sapiens
gagggagtgcatttaacataaaaaca

SEQ ID NO: 124058 - DNA, 26 bp, Homo sapiens
agggagtgcatttaacataaaaacag

SEQ ID NO: 124059 - DNA, 26 bp, Homo sapiens
gggagtgcatttaacataaaaacaga

SEQ ID NO: 124060 - DNA, 26 bp, Homo sapiens
ggagtgcatttaacataaaaacagaa

SEQ ID NO: 124061 - DNA, 26 bp, Homo sapiens
gagtgcatttaacataaaaacagaag

SEQ ID NO: 124062 - DNA, 26 bp, Homo sapiens
agtgcatttaacataaaaacagaaga

SEQ ID NO: 124063 - DNA, 26 bp, Homo sapiens
gtgcatttaacataaaaacagaagat

SEQ ID NO: 124064 - DNA, 26 bp, Homo sapiens
tgcatttaacataaaaacagaagatg

SEQ ID NO: 124065 - DNA, 26 bp, Homo sapiens
gcatttaacataaaaacagaagatga

SEQ ID NO: 124066 - DNA, 26 bp, Homo sapiens
catttaacataaaaacagaagatgaa

SEQ ID NO: 124067 - DNA, 26 bp, Homo sapiens
atttaacataaaaacagaagatgaat

SEQ ID NO: 124068 - DNA, 26 bp, Homo sapiens
tttaacataaaaacagaagatgaatc

SEQ ID NO: 124069 - DNA, 26 bp, Homo sapiens
ttaacataaaaacagaagatgaatcc

SEQ ID NO: 124070 - DNA, 26 bp, Homo sapiens
taacataaaaacagaagatgaatcct

SEQ ID NO: 124071 - DNA, 26 bp, Homo sapiens
aacataaaaacagaagatgaatcctg

SEQ ID NO: 124072 - DNA, 26 bp, Homo sapiens
acataaaaacagaagatgaatcctga

SEQ ID NO: 124073 - DNA, 26 bp, Homo sapiens
cataaaaacagaagatgaatcctgag

SEQ ID NO: 124074 - DNA, 26 bp, Homo sapiens
ataaaaacagaagatgaatcctgaga

SEQ ID NO: 124075 - DNA, 26 bp, Homo sapiens
taaaaacagaagatgaatcctgagat

SEQ ID NO: 124076 - DNA, 26 bp, Homo sapiens
aaaaacagaagatgaatcctgagatt

SEQ ID NO: 124077 - DNA, 26 bp, Homo sapiens
aaaacagaagatgaatcctgagattt

SEQ ID NO: 124078 - DNA, 26 bp, Homo sapiens
aaacagaagatgaatcctgagatttc

SEQ ID NO: 124079 - DNA, 26 bp, Homo sapiens
aacagaagatgaatcctgagatttct

SEQ ID NO: 124080 - DNA, 26 bp, Homo sapiens
acagaagatgaatcctgagatttctc

SEQ ID NO: 124081 - DNA, 26 bp, Homo sapiens
cagaagatgaatcctgagatttctca

SEQ ID NO: 124082 - DNA, 26 bp, Homo sapiens
agaagatgaatcctgagatttctcat

SEQ ID NO: 124083 - DNA, 26 bp, Homo sapiens
gaagatgaatcctgagatttctcata

SEQ ID NO: 124084 - DNA, 26 bp, Homo sapiens
aagatgaatcctgagatttctcataa

SEQ ID NO: 124085 - DNA, 26 bp, Homo sapiens
agatgaatcctgagatttctcataaa

SEQ ID NO: 124086 - DNA, 26 bp, Homo sapiens
gatgaatcctgagatttctcataaat

SEQ ID NO: 124087 - DNA, 26 bp, Homo sapiens
atgaatcctgagatttctcataaatg

SEQ ID NO: 124088 - DNA, 26 bp, Homo sapiens
tgaatcctgagatttctcataaatgt

SEQ ID NO: 124089 - DNA, 26 bp, Homo sapiens
gaatcctgagatttctcataaatgtc

SEQ ID NO: 124090 - DNA, 26 bp, Homo sapiens
aatcctgagatttctcataaatgtct

SEQ ID NO: 124091 - DNA, 26 bp, Homo sapiens
atcctgagatttctcataaatgtctt

SEQ ID NO: 124092 - DNA, 26 bp, Homo sapiens
tcctgagatttctcataaatgtctta

SEQ ID NO: 124093 - DNA, 26 bp, Homo sapiens
cctgagatttctcataaatgtcttaa

SEQ ID NO: 124094 - DNA, 26 bp, Homo sapiens
ctgagatttctcataaatgtcttaat

SEQ ID NO: 124095 - DNA, 26 bp, Homo sapiens
tgagatttctcataaatgtcttaatg

SEQ ID NO: 124096 - DNA, 26 bp, Homo sapiens
gagatttctcataaatgtcttaatgt

SEQ ID NO: 124097 - DNA, 26 bp, Homo sapiens
agatttctcataaatgtcttaatgtc

SEQ ID NO: 124098 - DNA, 26 bp, Homo sapiens
gatttctcataaatgtcttaatgtcc

SEQ ID NO: 124099 - DNA, 26 bp, Homo sapiens
atttctcataaatgtcttaatgtcct

SEQ ID NO: 124100 - DNA, 26 bp, Homo sapiens
tttctcataaatgtcttaatgtccta

SEQ ID NO: 124101 - DNA, 26 bp, Homo sapiens
ttctcataaatgtcttaatgtcctag

SEQ ID NO: 124102 - DNA, 26 bp, Homo sapiens
tctcataaatgtcttaatgtcctaga

SEQ ID NO: 124103 - DNA, 26 bp, Homo sapiens
ctcataaatgtcttaatgtcctagag

SEQ ID NO: 124104 - DNA, 26 bp, Homo sapiens
tcataaatgtcttaatgtcctagaga

SEQ ID NO: 124105 - DNA, 26 bp, Homo sapiens
cataaatgtcttaatgtcctagagat

SEQ ID NO: 124106 - DNA, 26 bp, Homo sapiens
ataaatgtcttaatgtcctagagatg

SEQ ID NO: 124107 - DNA, 26 bp, Homo sapiens
taaatgtcttaatgtcctagagatgt

SEQ ID NO: 124108 - DNA, 26 bp, Homo sapiens
aaatgtcttaatgtcctagagatgtg

SEQ ID NO: 124109 - DNA, 26 bp, Homo sapiens
aatgtcttaatgtcctagagatgtgg

SEQ ID NO: 124110 - DNA, 26 bp, Homo sapiens
atgtcttaatgtcctagagatgtggg

SEQ ID NO: 124111 - DNA, 26 bp, Homo sapiens
tgtcttaatgtcctagagatgtgggc

SEQ ID NO: 124112 - DNA, 26 bp, Homo sapiens
gtcttaatgtcctagagatgtgggca

SEQ ID NO: 124113 - DNA, 26 bp, Homo sapiens
tcttaatgtcctagagatgtgggcac

SEQ ID NO: 124114 - DNA, 26 bp, Homo sapiens
cttaatgtcctagagatgtgggcact

SEQ ID NO: 124115 - DNA, 26 bp, Homo sapiens
ttaatgtcctagagatgtgggcactt

SEQ ID NO: 124116 - DNA, 26 bp, Homo sapiens
taatgtcctagagatgtgggcacttg

SEQ ID NO: 124117 - DNA, 26 bp, Homo sapiens
aatgtcctagagatgtgggcacttgc

SEQ ID NO: 124118 - DNA, 26 bp, Homo sapiens
atgtcctagagatgtgggcacttgct

SEQ ID NO: 124119 - DNA, 26 bp, Homo sapiens
tgtcctagagatgtgggcacttgctc

SEQ ID NO: 124120 - DNA, 26 bp, Homo sapiens
gtcctagagatgtgggcacttgctcc

SEQ ID NO: 124121 - DNA, 26 bp, Homo sapiens
tcctagagatgtgggcacttgctcca

SEQ ID NO: 124122 - DNA, 26 bp, Homo sapiens
cctagagatgtgggcacttgctccat

SEQ ID NO: 124123 - DNA, 26 bp, Homo sapiens
ctagagatgtgggcacttgctccata

SEQ ID NO: 124124 - DNA, 26 bp, Homo sapiens
tagagatgtgggcacttgctccatag

SEQ ID NO: 124125 - DNA, 26 bp, Homo sapiens
agagatgtgggcacttgctccatagt

SEQ ID NO: 124126 - DNA, 26 bp, Homo sapiens
gagatgtgggcacttgctccatagta

SEQ ID NO: 124127 - DNA, 26 bp, Homo sapiens
agatgtgggcacttgctccatagtaa

SEQ ID NO: 124128 - DNA, 26 bp, Homo sapiens
gatgtgggcacttgctccatagtaaa

SEQ ID NO: 124129 - DNA, 26 bp, Homo sapiens
atgtgggcacttgctccatagtaaat

SEQ ID NO: 124130 - DNA, 26 bp, Homo sapiens
tgtgggcacttgctccatagtaaatt

SEQ ID NO: 124131 - DNA, 26 bp, Homo sapiens
gtgggcacttgctccatagtaaatta

SEQ ID NO: 124132 - DNA, 26 bp, Homo sapiens
tgggcacttgctccatagtaaattat

SEQ ID NO: 124133 - DNA, 26 bp, Homo sapiens
gggcacttgctccatagtaaattatg

SEQ ID NO: 124134 - DNA, 26 bp, Homo sapiens
ggcacttgctccatagtaaattatgg

SEQ ID NO: 124135 - DNA, 26 bp, Homo sapiens
gcacttgctccatagtaaattatgga

SEQ ID NO: 124136 - DNA, 26 bp, Homo sapiens
cacttgctccatagtaaattatggat

SEQ ID NO: 124137 - DNA, 26 bp, Homo sapiens
acttgctccatagtaaattatggatg

SEQ ID NO: 124138 - DNA, 26 bp, Homo sapiens
cttgctccatagtaaattatggatgc

SEQ ID NO: 124139 - DNA, 26 bp, Homo sapiens
ttgctccatagtaaattatggatgcc

SEQ ID NO: 124140 - DNA, 26 bp, Homo sapiens
tgctccatagtaaattatggatgcca

SEQ ID NO: 124141 - DNA, 26 bp, Homo sapiens
gctccatagtaaattatggatgccac

SEQ ID NO: 124142 - DNA, 26 bp, Homo sapiens
ctccatagtaaattatggatgccacg

SEQ ID NO: 124143 - DNA, 26 bp, Homo sapiens
tccatagtaaattatggatgccacgt

SEQ ID NO: 124144 - DNA, 26 bp, Homo sapiens
ccatagtaaattatggatgccacgtt

SEQ ID NO: 124145 - DNA, 26 bp, Homo sapiens
catagtaaattatggatgccacgttt

SEQ ID NO: 124146 - DNA, 26 bp, Homo sapiens
atagtaaattatggatgccacgtttt

SEQ ID NO: 124147 - DNA, 26 bp, Homo sapiens
tagtaaattatggatgccacgtttta

SEQ ID NO: 124148 - DNA, 26 bp, Homo sapiens
agtaaattatggatgccacgttttac

SEQ ID NO: 124149 - DNA, 26 bp, Homo sapiens
gtaaattatggatgccacgttttaca

SEQ ID NO: 124150 - DNA, 26 bp, Homo sapiens
taaattatggatgccacgttttacaa

SEQ ID NO: 124151 - DNA, 26 bp, Homo sapiens
aaattatggatgccacgttttacaaa

SEQ ID NO: 124152 - DNA, 26 bp, Homo sapiens
aattatggatgccacgttttacaaaa

SEQ ID NO: 124153 - DNA, 26 bp, Homo sapiens
attatggatgccacgttttacaaaat

SEQ ID NO: 124154 - DNA, 26 bp, Homo sapiens
ttatggatgccacgttttacaaaatc

SEQ ID NO: 124155 - DNA, 26 bp, Homo sapiens
tatggatgccacgttttacaaaatcc

SEQ ID NO: 124156 - DNA, 26 bp, Homo sapiens
atggatgccacgttttacaaaatcct

SEQ ID NO: 124157 - DNA, 26 bp, Homo sapiens
tggatgccacgttttacaaaatcctt

SEQ ID NO: 124158 - DNA, 26 bp, Homo sapiens
ggatgccacgttttacaaaatcctta

SEQ ID NO: 124159 - DNA, 26 bp, Homo sapiens
gatgccacgttttacaaaatccttac

SEQ ID NO: 124160 - DNA, 26 bp, Homo sapiens
atgccacgttttacaaaatccttact

SEQ ID NO: 124161 - DNA, 26 bp, Homo sapiens
tgccacgttttacaaaatccttactg

SEQ ID NO: 124162 - DNA, 26 bp, Homo sapiens
gccacgttttacaaaatccttactgc

SEQ ID NO: 124163 - DNA, 26 bp, Homo sapiens
ccacgttttacaaaatccttactgcc

SEQ ID NO: 124164 - DNA, 26 bp, Homo sapiens
cacgttttacaaaatccttactgccc

SEQ ID NO: 124165 - DNA, 26 bp, Homo sapiens
acgttttacaaaatccttactgcccc

SEQ ID NO: 124166 - DNA, 26 bp, Homo sapiens
cgttttacaaaatccttactgcccct

SEQ ID NO: 124167 - DNA, 26 bp, Homo sapiens
gttttacaaaatccttactgcccctt

SEQ ID NO: 124168 - DNA, 26 bp, Homo sapiens
ttttacaaaatccttactgccccttt

SEQ ID NO: 124169 - DNA, 26 bp, Homo sapiens
tttacaaaatccttactgcccctttg

SEQ ID NO: 124170 - DNA, 26 bp, Homo sapiens
ttacaaaatccttactgcccctttga

SEQ ID NO: 124171 - DNA, 26 bp, Homo sapiens
tacaaaatccttactgcccctttgaa

SEQ ID NO: 124172 - DNA, 26 bp, Homo sapiens
acaaaatccttactgcccctttgaat

SEQ ID NO: 124173 - DNA, 26 bp, Homo sapiens
caaaatccttactgcccctttgaatt

SEQ ID NO: 124174 - DNA, 26 bp, Homo sapiens
aaaatccttactgcccctttgaattg

SEQ ID NO: 124175 - DNA, 26 bp, Homo sapiens
aaatccttactgcccctttgaattgt

SEQ ID NO: 124176 - DNA, 26 bp, Homo sapiens
aatccttactgcccctttgaattgtg

SEQ ID NO: 124177 - DNA, 26 bp, Homo sapiens
atccttactgcccctttgaattgtgt

SEQ ID NO: 124178 - DNA, 26 bp, Homo sapiens
tccttactgcccctttgaattgtgtc

SEQ ID NO: 124179 - DNA, 26 bp, Homo sapiens
ccttactgcccctttgaattgtgtcc

SEQ ID NO: 124180 - DNA, 26 bp, Homo sapiens
cttactgcccctttgaattgtgtcct

SEQ ID NO: 124181 - DNA, 26 bp, Homo sapiens
ttactgcccctttgaattgtgtcctt

SEQ ID NO: 124182 - DNA, 26 bp, Homo sapiens
tactgcccctttgaattgtgtccttc

SEQ ID NO: 124183 - DNA, 26 bp, Homo sapiens
actgcccctttgaattgtgtccttcc

SEQ ID NO: 124184 - DNA, 26 bp, Homo sapiens
ctgcccctttgaattgtgtccttcct

SEQ ID NO: 124185 - DNA, 26 bp, Homo sapiens
tgcccctttgaattgtgtccttcctc

SEQ ID NO: 124186 - DNA, 26 bp, Homo sapiens
gcccctttgaattgtgtccttcctcc

SEQ ID NO: 124187 - DNA, 26 bp, Homo sapiens
cccctttgaattgtgtccttcctcca

SEQ ID NO: 124188 - DNA, 26 bp, Homo sapiens
ccctttgaattgtgtccttcctccaa

SEQ ID NO: 124189 - DNA, 26 bp, Homo sapiens
cctttgaattgtgtccttcctccaag

SEQ ID NO: 124190 - DNA, 26 bp, Homo sapiens
ctttgaattgtgtccttcctccaaga

SEQ ID NO: 124191 - DNA, 26 bp, Homo sapiens
tttgaattgtgtccttcctccaagat

SEQ ID NO: 124192 - DNA, 26 bp, Homo sapiens
ttgaattgtgtccttcctccaagata

SEQ ID NO: 124193 - DNA, 26 bp, Homo sapiens
tgaattgtgtccttcctccaagataa

SEQ ID NO: 124194 - DNA, 26 bp, Homo sapiens
gaattgtgtccttcctccaagataag

SEQ ID NO: 124195 - DNA, 26 bp, Homo sapiens
aattgtgtccttcctccaagataaga

SEQ ID NO: 124196 - DNA, 26 bp, Homo sapiens
attgtgtccttcctccaagataagaa

SEQ ID NO: 124197 - DNA, 26 bp, Homo sapiens
ttgtgtccttcctccaagataagaag

SEQ ID NO: 124198 - DNA, 26 bp, Homo sapiens
tgtgtccttcctccaagataagaagc

SEQ ID NO: 124199 - DNA, 26 bp, Homo sapiens
gtgtccttcctccaagataagaagct

SEQ ID NO: 124200 - DNA, 26 bp, Homo sapiens
tgtccttcctccaagataagaagcta

SEQ ID NO: 124201 - DNA, 26 bp, Homo sapiens
gtccttcctccaagataagaagctat

SEQ ID NO: 124202 - DNA, 26 bp, Homo sapiens
tccttcctccaagataagaagctatg

SEQ ID NO: 124203 - DNA, 26 bp, Homo sapiens
ccttcctccaagataagaagctatga

SEQ ID NO: 124204 - DNA, 26 bp, Homo sapiens
cttcctccaagataagaagctatgac

SEQ ID NO: 124205 - DNA, 26 bp, Homo sapiens
ttcctccaagataagaagctatgact

SEQ ID NO: 124206 - DNA, 26 bp, Homo sapiens
tcctccaagataagaagctatgactc

SEQ ID NO: 124207 - DNA, 26 bp, Homo sapiens
cctccaagataagaagctatgactca

SEQ ID NO: 124208 - DNA, 26 bp, Homo sapiens
ctccaagataagaagctatgactcaa

SEQ ID NO: 124209 - DNA, 26 bp, Homo sapiens
tccaagataagaagctatgactcaat

SEQ ID NO: 124210 - DNA, 26 bp, Homo sapiens
ccaagataagaagctatgactcaatt

SEQ ID NO: 124211 - DNA, 26 bp, Homo sapiens
caagataagaagctatgactcaattg

SEQ ID NO: 124212 - DNA, 26 bp, Homo sapiens
aagataagaagctatgactcaattgt

SEQ ID NO: 124213 - DNA, 26 bp, Homo sapiens
agataagaagctatgactcaattgtt

SEQ ID NO: 124214 - DNA, 26 bp, Homo sapiens
gataagaagctatgactcaattgttc

SEQ ID NO: 124215 - DNA, 26 bp, Homo sapiens
ataagaagctatgactcaattgttca

SEQ ID NO: 124216 - DNA, 26 bp, Homo sapiens
taagaagctatgactcaattgttcaa

SEQ ID NO: 124217 - DNA, 26 bp, Homo sapiens
aagaagctatgactcaattgttcaac

SEQ ID NO: 124218 - DNA, 26 bp, Homo sapiens
agaagctatgactcaattgttcaaca

SEQ ID NO: 124219 - DNA, 26 bp, Homo sapiens
gaagctatgactcaattgttcaacat

SEQ ID NO: 124220 - DNA, 26 bp, Homo sapiens
aagctatgactcaattgttcaacatg

SEQ ID NO: 124221 - DNA, 26 bp, Homo sapiens
agctatgactcaattgttcaacatgg

SEQ ID NO: 124222 - DNA, 26 bp, Homo sapiens
gctatgactcaattgttcaacatgga

SEQ ID NO: 124223 - DNA, 26 bp, Homo sapiens
ctatgactcaattgttcaacatggaa

SEQ ID NO: 124224 - DNA, 26 bp, Homo sapiens
tatgactcaattgttcaacatggaat

SEQ ID NO: 124225 - DNA, 26 bp, Homo sapiens
atgactcaattgttcaacatggaatt

SEQ ID NO: 124226 - DNA, 26 bp, Homo sapiens
tgactcaattgttcaacatggaatta

SEQ ID NO: 124227 - DNA, 26 bp, Homo sapiens
gactcaattgttcaacatggaattat

SEQ ID NO: 124228 - DNA, 26 bp, Homo sapiens
actcaattgttcaacatggaattata

SEQ ID NO: 124229 - DNA, 26 bp, Homo sapiens
ctcaattgttcaacatggaattataa

SEQ ID NO: 124230 - DNA, 26 bp, Homo sapiens
tcaattgttcaacatggaattataat

SEQ ID NO: 124231 - DNA, 26 bp, Homo sapiens
caattgttcaacatggaattataatg

SEQ ID NO: 124232 - DNA, 26 bp, Homo sapiens
aattgttcaacatggaattataatga

SEQ ID NO: 124233 - DNA, 26 bp, Homo sapiens
attgttcaacatggaattataatgaa

SEQ ID NO: 124234 - DNA, 26 bp, Homo sapiens
ttgttcaacatggaattataatgaaa

SEQ ID NO: 124235 - DNA, 26 bp, Homo sapiens
tgttcaacatggaattataatgaaaa

SEQ ID NO: 124236 - DNA, 26 bp, Homo sapiens
gttcaacatggaattataatgaaaag

SEQ ID NO: 124237 - DNA, 26 bp, Homo sapiens
ttcaacatggaattataatgaaaagc

SEQ ID NO: 124238 - DNA, 26 bp, Homo sapiens
tcaacatggaattataatgaaaagcc

SEQ ID NO: 124239 - DNA, 26 bp, Homo sapiens
caacatggaattataatgaaaagcct

SEQ ID NO: 124240 - DNA, 26 bp, Homo sapiens
aacatggaattataatgaaaagcctt

SEQ ID NO: 124241 - DNA, 26 bp, Homo sapiens
acatggaattataatgaaaagccttt

SEQ ID NO: 124242 - DNA, 26 bp, Homo sapiens
catggaattataatgaaaagcctttc

SEQ ID NO: 124243 - DNA, 26 bp, Homo sapiens
atggaattataatgaaaagcctttct

SEQ ID NO: 124244 - DNA, 26 bp, Homo sapiens
tggaattataatgaaaagcctttcta

SEQ ID NO: 124245 - DNA, 26 bp, Homo sapiens
ggaattataatgaaaagcctttctag

SEQ ID NO: 124246 - DNA, 26 bp, Homo sapiens
gaattataatgaaaagcctttctagt

SEQ ID NO: 124247 - DNA, 26 bp, Homo sapiens
aattataatgaaaagcctttctagtt

SEQ ID NO: 124248 - DNA, 26 bp, Homo sapiens
attataatgaaaagcctttctagttc

SEQ ID NO: 124249 - DNA, 26 bp, Homo sapiens
ttataatgaaaagcctttctagttct

SEQ ID NO: 124250 - DNA, 26 bp, Homo sapiens
tataatgaaaagcctttctagttcta

SEQ ID NO: 124251 - DNA, 26 bp, Homo sapiens
ataatgaaaagcctttctagttctat

SEQ ID NO: 124252 - DNA, 26 bp, Homo sapiens
taatgaaaagcctttctagttctatc

SEQ ID NO: 124253 - DNA, 26 bp, Homo sapiens
aatgaaaagcctttctagttctatct

SEQ ID NO: 124254 - DNA, 26 bp, Homo sapiens
atgaaaagcctttctagttctatctt

SEQ ID NO: 124255 - DNA, 26 bp, Homo sapiens
tgaaaagcctttctagttctatcttt

SEQ ID NO: 124256 - DNA, 26 bp, Homo sapiens
gaaaagcctttctagttctatctttc

SEQ ID NO: 124257 - DNA, 26 bp, Homo sapiens
aaaagcctttctagttctatctttcc

SEQ ID NO: 124258 - DNA, 26 bp, Homo sapiens
aaagcctttctagttctatctttccc

SEQ ID NO: 124259 - DNA, 26 bp, Homo sapiens
aagcctttctagttctatctttccct

SEQ ID NO: 124260 - DNA, 26 bp, Homo sapiens
agcctttctagttctatctttcccta

SEQ ID NO: 124261 - DNA, 26 bp, Homo sapiens
gcctttctagttctatctttccctaa

SEQ ID NO: 124262 - DNA, 26 bp, Homo sapiens
cctttctagttctatctttccctaaa

SEQ ID NO: 124263 - DNA, 26 bp, Homo sapiens
ctttctagttctatctttccctaaat

SEQ ID NO: 124264 - DNA, 26 bp, Homo sapiens
tttctagttctatctttccctaaatg

SEQ ID NO: 124265 - DNA, 26 bp, Homo sapiens
ttctagttctatctttccctaaatgg

SEQ ID NO: 124266 - DNA, 26 bp, Homo sapiens
tctagttctatctttccctaaatggg

SEQ ID NO: 124267 - DNA, 26 bp, Homo sapiens
ctagttctatctttccctaaatgggc

SEQ ID NO: 124268 - DNA, 26 bp, Homo sapiens
tagttctatctttccctaaatgggct

SEQ ID NO: 124269 - DNA, 26 bp, Homo sapiens
agttctatctttccctaaatgggctc

SEQ ID NO: 124270 - DNA, 26 bp, Homo sapiens
gttctatctttccctaaatgggctct

SEQ ID NO: 124271 - DNA, 26 bp, Homo sapiens
ttctatctttccctaaatgggctcta

SEQ ID NO: 124272 - DNA, 26 bp, Homo sapiens
tctatctttccctaaatgggctctat

SEQ ID NO: 124273 - DNA, 26 bp, Homo sapiens
ctatctttccctaaatgggctctatt

SEQ ID NO: 124274 - DNA, 26 bp, Homo sapiens
tatctttccctaaatgggctctattt

SEQ ID NO: 124275 - DNA, 26 bp, Homo sapiens
atctttccctaaatgggctctatttc

SEQ ID NO: 124276 - DNA, 26 bp, Homo sapiens
tctttccctaaatgggctctatttct

SEQ ID NO: 124277 - DNA, 26 bp, Homo sapiens
ctttccctaaatgggctctatttctt

SEQ ID NO: 124278 - DNA, 26 bp, Homo sapiens
tttccctaaatgggctctatttcttg

SEQ ID NO: 124279 - DNA, 26 bp, Homo sapiens
ttccctaaatgggctctatttcttgt

SEQ ID NO: 124280 - DNA, 26 bp, Homo sapiens
tccctaaatgggctctatttcttgta

SEQ ID NO: 124281 - DNA, 26 bp, Homo sapiens
ccctaaatgggctctatttcttgtaa

SEQ ID NO: 124282 - DNA, 26 bp, Homo sapiens
cctaaatgggctctatttcttgtaat

SEQ ID NO: 124283 - DNA, 26 bp, Homo sapiens
ctaaatgggctctatttcttgtaatt

SEQ ID NO: 124284 - DNA, 26 bp, Homo sapiens
taaatgggctctatttcttgtaattc

SEQ ID NO: 124285 - DNA, 26 bp, Homo sapiens
aaatgggctctatttcttgtaattca

SEQ ID NO: 124286 - DNA, 26 bp, Homo sapiens
aatgggctctatttcttgtaattcac

SEQ ID NO: 124287 - DNA, 26 bp, Homo sapiens
atgggctctatttcttgtaattcaca

SEQ ID NO: 124288 - DNA, 26 bp, Homo sapiens
tgggctctatttcttgtaattcacat

SEQ ID NO: 124289 - DNA, 26 bp, Homo sapiens
gggctctatttcttgtaattcacatg

SEQ ID NO: 124290 - DNA, 26 bp, Homo sapiens
ggctctatttcttgtaattcacatga

SEQ ID NO: 124291 - DNA, 26 bp, Homo sapiens
gctctatttcttgtaattcacatgac

SEQ ID NO: 124292 - DNA, 26 bp, Homo sapiens
ctctatttcttgtaattcacatgaca

SEQ ID NO: 124293 - DNA, 26 bp, Homo sapiens
tctatttcttgtaattcacatgacac

SEQ ID NO: 124294 - DNA, 26 bp, Homo sapiens
ctatttcttgtaattcacatgacact

SEQ ID NO: 124295 - DNA, 26 bp, Homo sapiens
tatttcttgtaattcacatgacactc

SEQ ID NO: 124296 - DNA, 26 bp, Homo sapiens
atttcttgtaattcacatgacactct

SEQ ID NO: 124297 - DNA, 26 bp, Homo sapiens
tttcttgtaattcacatgacactctt

SEQ ID NO: 124298 - DNA, 26 bp, Homo sapiens
ttcttgtaattcacatgacactcttt

SEQ ID NO: 124299 - DNA, 26 bp, Homo sapiens
tcttgtaattcacatgacactctttg

SEQ ID NO: 124300 - DNA, 26 bp, Homo sapiens
cttgtaattcacatgacactctttgg

SEQ ID NO: 124301 - DNA, 26 bp, Homo sapiens
ttgtaattcacatgacactctttggc

SEQ ID NO: 124302 - DNA, 26 bp, Homo sapiens
tgtaattcacatgacactctttggct

SEQ ID NO: 124303 - DNA, 26 bp, Homo sapiens
gtaattcacatgacactctttggctg

SEQ ID NO: 124304 - DNA, 26 bp, Homo sapiens
taattcacatgacactctttggctgt

SEQ ID NO: 124305 - DNA, 26 bp, Homo sapiens
aattcacatgacactctttggctgtg

SEQ ID NO: 124306 - DNA, 26 bp, Homo sapiens
attcacatgacactctttggctgtgg

SEQ ID NO: 124307 - DNA, 26 bp, Homo sapiens
ttcacatgacactctttggctgtggc

SEQ ID NO: 124308 - DNA, 26 bp, Homo sapiens
tcacatgacactctttggctgtggct

SEQ ID NO: 124309 - DNA, 26 bp, Homo sapiens
cacatgacactctttggctgtggctg

SEQ ID NO: 124310 - DNA, 26 bp, Homo sapiens
acatgacactctttggctgtggctgt

SEQ ID NO: 124311 - DNA, 26 bp, Homo sapiens
catgacactctttggctgtggctgtc

SEQ ID NO: 124312 - DNA, 26 bp, Homo sapiens
atgacactctttggctgtggctgtct

SEQ ID NO: 124313 - DNA, 26 bp, Homo sapiens
tgacactctttggctgtggctgtctg

SEQ ID NO: 124314 - DNA, 26 bp, Homo sapiens
gacactctttggctgtggctgtctgt

SEQ ID NO: 124315 - DNA, 26 bp, Homo sapiens
acactctttggctgtggctgtctgtt

SEQ ID NO: 124316 - DNA, 26 bp, Homo sapiens
cactctttggctgtggctgtctgtta

SEQ ID NO: 124317 - DNA, 26 bp, Homo sapiens
actctttggctgtggctgtctgttaa

SEQ ID NO: 124318 - DNA, 26 bp, Homo sapiens
ctctttggctgtggctgtctgttaaa

SEQ ID NO: 124319 - DNA, 26 bp, Homo sapiens
tctttggctgtggctgtctgttaaat

SEQ ID NO: 124320 - DNA, 26 bp, Homo sapiens
ctttggctgtggctgtctgttaaatt

SEQ ID NO: 124321 - DNA, 26 bp, Homo sapiens
tttggctgtggctgtctgttaaattt

SEQ ID NO: 124322 - DNA, 26 bp, Homo sapiens
ttggctgtggctgtctgttaaatttc

SEQ ID NO: 124323 - DNA, 26 bp, Homo sapiens
tggctgtggctgtctgttaaatttcc

SEQ ID NO: 124324 - DNA, 26 bp, Homo sapiens
ggctgtggctgtctgttaaatttcct

SEQ ID NO: 124325 - DNA, 26 bp, Homo sapiens
gctgtggctgtctgttaaatttcctg

SEQ ID NO: 124326 - DNA, 26 bp, Homo sapiens
ctgtggctgtctgttaaatttcctgt

SEQ ID NO: 124327 - DNA, 26 bp, Homo sapiens
tgtggctgtctgttaaatttcctgtt

SEQ ID NO: 124328 - DNA, 26 bp, Homo sapiens
gtggctgtctgttaaatttcctgttt

SEQ ID NO: 124329 - DNA, 26 bp, Homo sapiens
tggctgtctgttaaatttcctgtttt

SEQ ID NO: 124330 - DNA, 26 bp, Homo sapiens
ggctgtctgttaaatttcctgttttg

SEQ ID NO: 124331 - DNA, 26 bp, Homo sapiens
gctgtctgttaaatttcctgttttgg

SEQ ID NO: 124332 - DNA, 26 bp, Homo sapiens
ctgtctgttaaatttcctgttttgga

SEQ ID NO: 124333 - DNA, 26 bp, Homo sapiens
tgtctgttaaatttcctgttttggac

SEQ ID NO: 124334 - DNA, 26 bp, Homo sapiens
gtctgttaaatttcctgttttggact

SEQ ID NO: 124335 - DNA, 26 bp, Homo sapiens
tctgttaaatttcctgttttggacta

SEQ ID NO: 124336 - DNA, 26 bp, Homo sapiens
ctgttaaatttcctgttttggactag

SEQ ID NO: 124337 - DNA, 26 bp, Homo sapiens
tgttaaatttcctgttttggactagt

SEQ ID NO: 124338 - DNA, 26 bp, Homo sapiens
gttaaatttcctgttttggactagtt

SEQ ID NO: 124339 - DNA, 26 bp, Homo sapiens
ttaaatttcctgttttggactagttt

SEQ ID NO: 124340 - DNA, 26 bp, Homo sapiens
taaatttcctgttttggactagtttc

SEQ ID NO: 124341 - DNA, 26 bp, Homo sapiens
aaatttcctgttttggactagtttca

SEQ ID NO: 124342 - DNA, 26 bp, Homo sapiens
aatttcctgttttggactagtttcag

SEQ ID NO: 124343 - DNA, 26 bp, Homo sapiens
atttcctgttttggactagtttcagc

SEQ ID NO: 124344 - DNA, 26 bp, Homo sapiens
tttcctgttttggactagtttcagca

SEQ ID NO: 124345 - DNA, 26 bp, Homo sapiens
ttcctgttttggactagtttcagcaa

SEQ ID NO: 124346 - DNA, 26 bp, Homo sapiens
tcctgttttggactagtttcagcaaa

SEQ ID NO: 124347 - DNA, 26 bp, Homo sapiens
cctgttttggactagtttcagcaaac

SEQ ID NO: 124348 - DNA, 26 bp, Homo sapiens
ctgttttggactagtttcagcaaacc

SEQ ID NO: 124349 - DNA, 26 bp, Homo sapiens
tgttttggactagtttcagcaaacca

SEQ ID NO: 124350 - DNA, 26 bp, Homo sapiens
gttttggactagtttcagcaaaccaa

SEQ ID NO: 124351 - DNA, 26 bp, Homo sapiens
ttttggactagtttcagcaaaccaaa

SEQ ID NO: 124352 - DNA, 26 bp, Homo sapiens
tttggactagtttcagcaaaccaaaa

SEQ ID NO: 124353 - DNA, 26 bp, Homo sapiens
ttggactagtttcagcaaaccaaaac

SEQ ID NO: 124354 - DNA, 26 bp, Homo sapiens
tggactagtttcagcaaaccaaaaca

SEQ ID NO: 124355 - DNA, 26 bp, Homo sapiens
ggactagtttcagcaaaccaaaacaa

SEQ ID NO: 124356 - DNA, 26 bp, Homo sapiens
gactagtttcagcaaaccaaaacaaa

SEQ ID NO: 124357 - DNA, 26 bp, Homo sapiens
actagtttcagcaaaccaaaacaaat

SEQ ID NO: 124358 - DNA, 26 bp, Homo sapiens
ctagtttcagcaaaccaaaacaaata

SEQ ID NO: 124359 - DNA, 26 bp, Homo sapiens
tagtttcagcaaaccaaaacaaatag

SEQ ID NO: 124360 - DNA, 26 bp, Homo sapiens
agtttcagcaaaccaaaacaaatagc

SEQ ID NO: 124361 - DNA, 26 bp, Homo sapiens
gtttcagcaaaccaaaacaaatagct

SEQ ID NO: 124362 - DNA, 26 bp, Homo sapiens
tttcagcaaaccaaaacaaatagctc

SEQ ID NO: 124363 - DNA, 26 bp, Homo sapiens
ttcagcaaaccaaaacaaatagctca

SEQ ID NO: 124364 - DNA, 26 bp, Homo sapiens
tcagcaaaccaaaacaaatagctcac

SEQ ID NO: 124365 - DNA, 26 bp, Homo sapiens
cagcaaaccaaaacaaatagctcaca

SEQ ID NO: 124366 - DNA, 26 bp, Homo sapiens
agcaaaccaaaacaaatagctcacag

SEQ ID NO: 124367 - DNA, 26 bp, Homo sapiens
gcaaaccaaaacaaatagctcacaga

SEQ ID NO: 124368 - DNA, 26 bp, Homo sapiens
caaaccaaaacaaatagctcacagaa

SEQ ID NO: 124369 - DNA, 26 bp, Homo sapiens
aaaccaaaacaaatagctcacagaaa

SEQ ID NO: 124370 - DNA, 26 bp, Homo sapiens
aaccaaaacaaatagctcacagaaaa

SEQ ID NO: 124371 - DNA, 26 bp, Homo sapiens
accaaaacaaatagctcacagaaaag

SEQ ID NO: 124372 - DNA, 26 bp, Homo sapiens
ccaaaacaaatagctcacagaaaagg

SEQ ID NO: 124373 - DNA, 26 bp, Homo sapiens
caaaacaaatagctcacagaaaaggc

SEQ ID NO: 124374 - DNA, 26 bp, Homo sapiens
aaaacaaatagctcacagaaaaggca

SEQ ID NO: 124375 - DNA, 26 bp, Homo sapiens
aaacaaatagctcacagaaaaggcaa

SEQ ID NO: 124376 - DNA, 26 bp, Homo sapiens
aacaaatagctcacagaaaaggcaat

SEQ ID NO: 124377 - DNA, 26 bp, Homo sapiens
acaaatagctcacagaaaaggcaatg

SEQ ID NO: 124378 - DNA, 26 bp, Homo sapiens
caaatagctcacagaaaaggcaatgg

SEQ ID NO: 124379 - DNA, 26 bp, Homo sapiens
aaatagctcacagaaaaggcaatggt

SEQ ID NO: 124380 - DNA, 26 bp, Homo sapiens
aatagctcacagaaaaggcaatggta

SEQ ID NO: 124381 - DNA, 26 bp, Homo sapiens
atagctcacagaaaaggcaatggtaa

SEQ ID NO: 124382 - DNA, 26 bp, Homo sapiens
tagctcacagaaaaggcaatggtaac

SEQ ID NO: 124383 - DNA, 26 bp, Homo sapiens
agctcacagaaaaggcaatggtaact

SEQ ID NO: 124384 - DNA, 26 bp, Homo sapiens
gctcacagaaaaggcaatggtaacta

SEQ ID NO: 124385 - DNA, 26 bp, Homo sapiens
ctcacagaaaaggcaatggtaactac

SEQ ID NO: 124386 - DNA, 26 bp, Homo sapiens
tcacagaaaaggcaatggtaactact

SEQ ID NO: 124387 - DNA, 26 bp, Homo sapiens
cacagaaaaggcaatggtaactactt

SEQ ID NO: 124388 - DNA, 26 bp, Homo sapiens
acagaaaaggcaatggtaactacttt

SEQ ID NO: 124389 - DNA, 26 bp, Homo sapiens
cagaaaaggcaatggtaactactttt

SEQ ID NO: 124390 - DNA, 26 bp, Homo sapiens
agaaaaggcaatggtaactacttttt

SEQ ID NO: 124391 - DNA, 26 bp, Homo sapiens
gaaaaggcaatggtaactactttttt

SEQ ID NO: 124392 - DNA, 26 bp, Homo sapiens
aaaaggcaatggtaactacttttttt

SEQ ID NO: 124393 - DNA, 26 bp, Homo sapiens
aaaggcaatggtaactactttttttt

SEQ ID NO: 124394 - DNA, 26 bp, Homo sapiens
aaggcaatggtaactacttttttttt

SEQ ID NO: 124395 - DNA, 26 bp, Homo sapiens
aggcaatggtaactactttttttttt

SEQ ID NO: 124396 - DNA, 26 bp, Homo sapiens
ggcaatggtaactacttttttttttt

SEQ ID NO: 124397 - DNA, 26 bp, Homo sapiens
gcaatggtaactactttttttttttt

SEQ ID NO: 124398 - DNA, 26 bp, Homo sapiens
caatggtaactacttttttttttttt

SEQ ID NO: 124399 - DNA, 26 bp, Homo sapiens
aatggtaactactttttttttttttt

SEQ ID NO: 124400 - DNA, 26 bp, Homo sapiens
atggtaactacttttttttttttttt

SEQ ID NO: 124401 - DNA, 26 bp, Homo sapiens
tggtaactactttttttttttttttt

SEQ ID NO: 124402 - DNA, 26 bp, Homo sapiens
ggtaactacttttttttttttttttt

SEQ ID NO: 124403 - DNA, 26 bp, Homo sapiens
gtaactactttttttttttttttttt

SEQ ID NO: 124404 - DNA, 26 bp, Homo sapiens
taactacttttttttttttttttttt

SEQ ID NO: 124405 - DNA, 26 bp, Homo sapiens
aactactttttttttttttttttttt

SEQ ID NO: 124406 - DNA, 26 bp, Homo sapiens
actacttttttttttttttttttttt

SEQ ID NO: 124407 - DNA, 26 bp, Homo sapiens
ctactttttttttttttttttttttt

SEQ ID NO: 124408 - DNA, 26 bp, Homo sapiens
tacttttttttttttttttttttttt

SEQ ID NO: 124409 - DNA, 26 bp, Homo sapiens
actttttttttttttttttttttttt

SEQ ID NO: 124410 - DNA, 26 bp, Homo sapiens
cttttttttttttttttttttttttt

SEQ ID NO: 124411 - DNA, 26 bp, Homo sapiens
tttttttttttttttttttttttttt

SEQ ID NO: 124412 - DNA, 26 bp, Homo sapiens
tttttttttttttttttttttttttt

SEQ ID NO: 124413 - DNA, 26 bp, Homo sapiens
tttttttttttttttttttttttttt

SEQ ID NO: 124414 - DNA, 26 bp, Homo sapiens
tttttttttttttttttttttttttt

SEQ ID NO: 124415 - DNA, 26 bp, Homo sapiens
tttttttttttttttttttttttttt

SEQ ID NO: 124416 - DNA, 26 bp, Homo sapiens
tttttttttttttttttttttttttt

SEQ ID NO: 124417 - DNA, 26 bp, Homo sapiens
tttttttttttttttttttttttttg

SEQ ID NO: 124418 - DNA, 26 bp, Homo sapiens
ttttttttttttttttttttttttgg

SEQ ID NO: 124419 - DNA, 26 bp, Homo sapiens
tttttttttttttttttttttttggt

SEQ ID NO: 124420 - DNA, 26 bp, Homo sapiens
ttttttttttttttttttttttggta

SEQ ID NO: 124421 - DNA, 26 bp, Homo sapiens
tttttttttttttttttttttggtat

SEQ ID NO: 124422 - DNA, 26 bp, Homo sapiens
ttttttttttttttttttttggtatt

SEQ ID NO: 124423 - DNA, 26 bp, Homo sapiens
tttttttttttttttttttggtattt

SEQ ID NO: 124424 - DNA, 26 bp, Homo sapiens
ttttttttttttttttttggtatttt

SEQ ID NO: 124425 - DNA, 26 bp, Homo sapiens
tttttttttttttttttggtattttc

SEQ ID NO: 124426 - DNA, 26 bp, Homo sapiens
ttttttttttttttttggtattttca

SEQ ID NO: 124427 - DNA, 26 bp, Homo sapiens
tttttttttttttttggtattttcag

SEQ ID NO: 124428 - DNA, 26 bp, Homo sapiens
ttttttttttttttggtattttcagt

SEQ ID NO: 124429 - DNA, 26 bp, Homo sapiens
tttttttttttttggtattttcagtt

SEQ ID NO: 124430 - DNA, 26 bp, Homo sapiens
ttttttttttttggtattttcagtta

SEQ ID NO: 124431 - DNA, 26 bp, Homo sapiens
tttttttttttggtattttcagttag

SEQ ID NO: 124432 - DNA, 26 bp, Homo sapiens
ttttttttttggtattttcagttaga

SEQ ID NO: 124433 - DNA, 26 bp, Homo sapiens
tttttttttggtattttcagttagat

SEQ ID NO: 124434 - DNA, 26 bp, Homo sapiens
ttttttttggtattttcagttagatt

SEQ ID NO: 124435 - DNA, 26 bp, Homo sapiens
tttttttggtattttcagttagattc

SEQ ID NO: 124436 - DNA, 26 bp, Homo sapiens
ttttttggtattttcagttagattct

SEQ ID NO: 124437 - DNA, 26 bp, Homo sapiens
tttttggtattttcagttagattctt

SEQ ID NO: 124438 - DNA, 26 bp, Homo sapiens
ttttggtattttcagttagattcttt

SEQ ID NO: 124439 - DNA, 26 bp, Homo sapiens
tttggtattttcagttagattctttc

SEQ ID NO: 124440 - DNA, 26 bp, Homo sapiens
ttggtattttcagttagattctttct

SEQ ID NO: 124441 - DNA, 26 bp, Homo sapiens
tggtattttcagttagattctttctt

SEQ ID NO: 124442 - DNA, 26 bp, Homo sapiens
ggtattttcagttagattctttcttc

SEQ ID NO: 124443 - DNA, 26 bp, Homo sapiens
gtattttcagttagattctttcttct

SEQ ID NO: 124444 - DNA, 26 bp, Homo sapiens
tattttcagttagattctttcttctt

SEQ ID NO: 124445 - DNA, 26 bp, Homo sapiens
attttcagttagattctttcttctta

SEQ ID NO: 124446 - DNA, 26 bp, Homo sapiens
ttttcagttagattctttcttcttag

SEQ ID NO: 124447 - DNA, 26 bp, Homo sapiens
tttcagttagattctttcttcttaga

SEQ ID NO: 124448 - DNA, 26 bp, Homo sapiens
ttcagttagattctttcttcttagag

SEQ ID NO: 124449 - DNA, 26 bp, Homo sapiens
tcagttagattctttcttcttagagg

SEQ ID NO: 124450 - DNA, 26 bp, Homo sapiens
cagttagattctttcttcttagaggt

SEQ ID NO: 124451 - DNA, 26 bp, Homo sapiens
agttagattctttcttcttagaggta

SEQ ID NO: 124452 - DNA, 26 bp, Homo sapiens
gttagattctttcttcttagaggtac

SEQ ID NO: 124453 - DNA, 26 bp, Homo sapiens
ttagattctttcttcttagaggtaca

SEQ ID NO: 124454 - DNA, 26 bp, Homo sapiens
tagattctttcttcttagaggtacag

SEQ ID NO: 124455 - DNA, 26 bp, Homo sapiens
agattctttcttcttagaggtacaga

SEQ ID NO: 124456 - DNA, 26 bp, Homo sapiens
gattctttcttcttagaggtacagag

SEQ ID NO: 124457 - DNA, 26 bp, Homo sapiens
attctttcttcttagaggtacagaga

SEQ ID NO: 124458 - DNA, 26 bp, Homo sapiens
ttctttcttcttagaggtacagagaa

SEQ ID NO: 124459 - DNA, 26 bp, Homo sapiens
tctttcttcttagaggtacagagaaa

SEQ ID NO: 124460 - DNA, 26 bp, Homo sapiens
ctttcttcttagaggtacagagaaag

SEQ ID NO: 124461 - DNA, 26 bp, Homo sapiens
tttcttcttagaggtacagagaaagg

SEQ ID NO: 124462 - DNA, 26 bp, Homo sapiens
ttcttcttagaggtacagagaaaggg

SEQ ID NO: 124463 - DNA, 26 bp, Homo sapiens
tcttcttagaggtacagagaaaggga

SEQ ID NO: 124464 - DNA, 26 bp, Homo sapiens
cttcttagaggtacagagaaagggag

SEQ ID NO: 124465 - DNA, 26 bp, Homo sapiens
ttcttagaggtacagagaaagggagg

SEQ ID NO: 124466 - DNA, 26 bp, Homo sapiens
tcttagaggtacagagaaagggagga

SEQ ID NO: 124467 - DNA, 26 bp, Homo sapiens
cttagaggtacagagaaagggaggaa

SEQ ID NO: 124468 - DNA, 26 bp, Homo sapiens
ttagaggtacagagaaagggaggaaa

SEQ ID NO: 124469 - DNA, 26 bp, Homo sapiens
tagaggtacagagaaagggaggaaaa

SEQ ID NO: 124470 - DNA, 26 bp, Homo sapiens
agaggtacagagaaagggaggaaaat

SEQ ID NO: 124471 - DNA, 26 bp, Homo sapiens
gaggtacagagaaagggaggaaaata

SEQ ID NO: 124472 - DNA, 26 bp, Homo sapiens
aggtacagagaaagggaggaaaatag

SEQ ID NO: 124473 - DNA, 26 bp, Homo sapiens
ggtacagagaaagggaggaaaatagc

SEQ ID NO: 124474 - DNA, 26 bp, Homo sapiens
gtacagagaaagggaggaaaatagct

SEQ ID NO: 124475 - DNA, 26 bp, Homo sapiens
tacagagaaagggaggaaaatagcta

SEQ ID NO: 124476 - DNA, 26 bp, Homo sapiens
acagagaaagggaggaaaatagctac

SEQ ID NO: 124477 - DNA, 26 bp, Homo sapiens
cagagaaagggaggaaaatagctaca

SEQ ID NO: 124478 - DNA, 26 bp, Homo sapiens
agagaaagggaggaaaatagctacag

SEQ ID NO: 124479 - DNA, 26 bp, Homo sapiens
gagaaagggaggaaaatagctacaga

SEQ ID NO: 124480 - DNA, 26 bp, Homo sapiens
agaaagggaggaaaatagctacagac

SEQ ID NO: 124481 - DNA, 26 bp, Homo sapiens
gaaagggaggaaaatagctacagaca

SEQ ID NO: 124482 - DNA, 26 bp, Homo sapiens
aaagggaggaaaatagctacagacat

SEQ ID NO: 124483 - DNA, 26 bp, Homo sapiens
aagggaggaaaatagctacagacatg

SEQ ID NO: 124484 - DNA, 26 bp, Homo sapiens
agggaggaaaatagctacagacatgg

SEQ ID NO: 124485 - DNA, 26 bp, Homo sapiens
gggaggaaaatagctacagacatggt

SEQ ID NO: 124486 - DNA, 26 bp, Homo sapiens
ggaggaaaatagctacagacatggtg

SEQ ID NO: 124487 - DNA, 26 bp, Homo sapiens
gaggaaaatagctacagacatggtgt

SEQ ID NO: 124488 - DNA, 26 bp, Homo sapiens
aggaaaatagctacagacatggtgta

SEQ ID NO: 124489 - DNA, 26 bp, Homo sapiens
ggaaaatagctacagacatggtgtaa

SEQ ID NO: 124490 - DNA, 26 bp, Homo sapiens
gaaaatagctacagacatggtgtaag

SEQ ID NO: 124491 - DNA, 26 bp, Homo sapiens
aaaatagctacagacatggtgtaagt

SEQ ID NO: 124492 - DNA, 26 bp, Homo sapiens
aaatagctacagacatggtgtaagta

SEQ ID NO: 124493 - DNA, 26 bp, Homo sapiens
aatagctacagacatggtgtaagtag

SEQ ID NO: 124494 - DNA, 26 bp, Homo sapiens
atagctacagacatggtgtaagtagg

SEQ ID NO: 124495 - DNA, 26 bp, Homo sapiens
tagctacagacatggtgtaagtaggt

SEQ ID NO: 124496 - DNA, 26 bp, Homo sapiens
agctacagacatggtgtaagtaggtc

SEQ ID NO: 124497 - DNA, 26 bp, Homo sapiens
gctacagacatggtgtaagtaggtca

SEQ ID NO: 124498 - DNA, 26 bp, Homo sapiens
ctacagacatggtgtaagtaggtcac

SEQ ID NO: 124499 - DNA, 26 bp, Homo sapiens
tacagacatggtgtaagtaggtcaca

SEQ ID NO: 124500 - DNA, 26 bp, Homo sapiens
acagacatggtgtaagtaggtcacag

SEQ ID NO: 124501 - DNA, 26 bp, Homo sapiens
cagacatggtgtaagtaggtcacagc

SEQ ID NO: 124502 - DNA, 26 bp, Homo sapiens
agacatggtgtaagtaggtcacagca

SEQ ID NO: 124503 - DNA, 26 bp, Homo sapiens
gacatggtgtaagtaggtcacagcag

SEQ ID NO: 124504 - DNA, 26 bp, Homo sapiens
acatggtgtaagtaggtcacagcagt

SEQ ID NO: 124505 - DNA, 26 bp, Homo sapiens
catggtgtaagtaggtcacagcagtt

SEQ ID NO: 124506 - DNA, 26 bp, Homo sapiens
atggtgtaagtaggtcacagcagttt

SEQ ID NO: 124507 - DNA, 26 bp, Homo sapiens
tggtgtaagtaggtcacagcagtttc

SEQ ID NO: 124508 - DNA, 26 bp, Homo sapiens
ggtgtaagtaggtcacagcagtttca

SEQ ID NO: 124509 - DNA, 26 bp, Homo sapiens
gtgtaagtaggtcacagcagtttcaa

SEQ ID NO: 124510 - DNA, 26 bp, Homo sapiens
tgtaagtaggtcacagcagtttcaat

SEQ ID NO: 124511 - DNA, 26 bp, Homo sapiens
gtaagtaggtcacagcagtttcaatg

SEQ ID NO: 124512 - DNA, 26 bp, Homo sapiens
taagtaggtcacagcagtttcaatgc

SEQ ID NO: 124513 - DNA, 26 bp, Homo sapiens
aagtaggtcacagcagtttcaatgca

SEQ ID NO: 124514 - DNA, 26 bp, Homo sapiens
agtaggtcacagcagtttcaatgcac

SEQ ID NO: 124515 - DNA, 26 bp, Homo sapiens
gtaggtcacagcagtttcaatgcacc

SEQ ID NO: 124516 - DNA, 26 bp, Homo sapiens
taggtcacagcagtttcaatgcacca

SEQ ID NO: 124517 - DNA, 26 bp, Homo sapiens
aggtcacagcagtttcaatgcaccaa

SEQ ID NO: 124518 - DNA, 26 bp, Homo sapiens
ggtcacagcagtttcaatgcaccaaa

SEQ ID NO: 124519 - DNA, 26 bp, Homo sapiens
gtcacagcagtttcaatgcaccaaaa

SEQ ID NO: 124520 - DNA, 26 bp, Homo sapiens
tcacagcagtttcaatgcaccaaaaa

SEQ ID NO: 124521 - DNA, 26 bp, Homo sapiens
cacagcagtttcaatgcaccaaaaaa

SEQ ID NO: 124522 - DNA, 26 bp, Homo sapiens
acagcagtttcaatgcaccaaaaaat

SEQ ID NO: 124523 - DNA, 26 bp, Homo sapiens
cagcagtttcaatgcaccaaaaaatg

SEQ ID NO: 124524 - DNA, 26 bp, Homo sapiens
agcagtttcaatgcaccaaaaaatgt

SEQ ID NO: 124525 - DNA, 26 bp, Homo sapiens
gcagtttcaatgcaccaaaaaatgtg

SEQ ID NO: 124526 - DNA, 26 bp, Homo sapiens
cagtttcaatgcaccaaaaaatgtga

SEQ ID NO: 124527 - DNA, 26 bp, Homo sapiens
agtttcaatgcaccaaaaaatgtgac

SEQ ID NO: 124528 - DNA, 26 bp, Homo sapiens
gtttcaatgcaccaaaaaatgtgaca

SEQ ID NO: 124529 - DNA, 26 bp, Homo sapiens
tttcaatgcaccaaaaaatgtgacat

SEQ ID NO: 124530 - DNA, 26 bp, Homo sapiens
ttcaatgcaccaaaaaatgtgacatc

SEQ ID NO: 124531 - DNA, 26 bp, Homo sapiens
tcaatgcaccaaaaaatgtgacatct

SEQ ID NO: 124532 - DNA, 26 bp, Homo sapiens
caatgcaccaaaaaatgtgacatctc

SEQ ID NO: 124533 - DNA, 26 bp, Homo sapiens
aatgcaccaaaaaatgtgacatctcc

SEQ ID NO: 124534 - DNA, 26 bp, Homo sapiens
atgcaccaaaaaatgtgacatctcca

SEQ ID NO: 124535 - DNA, 26 bp, Homo sapiens
tgcaccaaaaaatgtgacatctccat

SEQ ID NO: 124536 - DNA, 26 bp, Homo sapiens
gcaccaaaaaatgtgacatctccatc

SEQ ID NO: 124537 - DNA, 26 bp, Homo sapiens
caccaaaaaatgtgacatctccatcc

SEQ ID NO: 124538 - DNA, 26 bp, Homo sapiens
accaaaaaatgtgacatctccatcca

SEQ ID NO: 124539 - DNA, 26 bp, Homo sapiens
ccaaaaaatgtgacatctccatccag

SEQ ID NO: 124540 - DNA, 26 bp, Homo sapiens
caaaaaatgtgacatctccatccagt

SEQ ID NO: 124541 - DNA, 26 bp, Homo sapiens
aaaaaatgtgacatctccatccagtg

SEQ ID NO: 124542 - DNA, 26 bp, Homo sapiens
aaaaatgtgacatctccatccagtga

SEQ ID NO: 124543 - DNA, 26 bp, Homo sapiens
aaaatgtgacatctccatccagtgat

SEQ ID NO: 124544 - DNA, 26 bp, Homo sapiens
aaatgtgacatctccatccagtgata

SEQ ID NO: 124545 - DNA, 26 bp, Homo sapiens
aatgtgacatctccatccagtgatat

SEQ ID NO: 124546 - DNA, 26 bp, Homo sapiens
atgtgacatctccatccagtgatatt

SEQ ID NO: 124547 - DNA, 26 bp, Homo sapiens
tgtgacatctccatccagtgatattt

SEQ ID NO: 124548 - DNA, 26 bp, Homo sapiens
gtgacatctccatccagtgatatttg

SEQ ID NO: 124549 - DNA, 26 bp, Homo sapiens
tgacatctccatccagtgatatttgt

SEQ ID NO: 124550 - DNA, 26 bp, Homo sapiens
gacatctccatccagtgatatttgtg

SEQ ID NO: 124551 - DNA, 26 bp, Homo sapiens
acatctccatccagtgatatttgtgc

SEQ ID NO: 124552 - DNA, 26 bp, Homo sapiens
catctccatccagtgatatttgtgca

SEQ ID NO: 124553 - DNA, 26 bp, Homo sapiens
atctccatccagtgatatttgtgcat

SEQ ID NO: 124554 - DNA, 26 bp, Homo sapiens
tctccatccagtgatatttgtgcatt

SEQ ID NO: 124555 - DNA, 26 bp, Homo sapiens
ctccatccagtgatatttgtgcattt

SEQ ID NO: 124556 - DNA, 26 bp, Homo sapiens
tccatccagtgatatttgtgcatttt

SEQ ID NO: 124557 - DNA, 26 bp, Homo sapiens
ccatccagtgatatttgtgcattttc

SEQ ID NO: 124558 - DNA, 26 bp, Homo sapiens
catccagtgatatttgtgcattttct

SEQ ID NO: 124559 - DNA, 26 bp, Homo sapiens
atccagtgatatttgtgcattttctc

SEQ ID NO: 124560 - DNA, 26 bp, Homo sapiens
tccagtgatatttgtgcattttctct

SEQ ID NO: 124561 - DNA, 26 bp, Homo sapiens
ccagtgatatttgtgcattttctctt

SEQ ID NO: 124562 - DNA, 26 bp, Homo sapiens
cagtgatatttgtgcattttctcttg

SEQ ID NO: 124563 - DNA, 26 bp, Homo sapiens
agtgatatttgtgcattttctcttgg

SEQ ID NO: 124564 - DNA, 26 bp, Homo sapiens
gtgatatttgtgcattttctcttggt

SEQ ID NO: 124565 - DNA, 26 bp, Homo sapiens
tgatatttgtgcattttctcttggta

SEQ ID NO: 124566 - DNA, 26 bp, Homo sapiens
gatatttgtgcattttctcttggtat

SEQ ID NO: 124567 - DNA, 26 bp, Homo sapiens
atatttgtgcattttctcttggtatt

SEQ ID NO: 124568 - DNA, 26 bp, Homo sapiens
tatttgtgcattttctcttggtattg

SEQ ID NO: 124569 - DNA, 26 bp, Homo sapiens
atttgtgcattttctcttggtattgc

SEQ ID NO: 124570 - DNA, 26 bp, Homo sapiens
tttgtgcattttctcttggtattgca

SEQ ID NO: 124571 - DNA, 26 bp, Homo sapiens
ttgtgcattttctcttggtattgcaa

SEQ ID NO: 124572 - DNA, 26 bp, Homo sapiens
tgtgcattttctcttggtattgcaag

SEQ ID NO: 124573 - DNA, 26 bp, Homo sapiens
gtgcattttctcttggtattgcaagt

SEQ ID NO: 124574 - DNA, 26 bp, Homo sapiens
tgcattttctcttggtattgcaagtt

SEQ ID NO: 124575 - DNA, 26 bp, Homo sapiens
gcattttctcttggtattgcaagttg

SEQ ID NO: 124576 - DNA, 26 bp, Homo sapiens
cattttctcttggtattgcaagttgg

SEQ ID NO: 124577 - DNA, 26 bp, Homo sapiens
attttctcttggtattgcaagttgga

SEQ ID NO: 124578 - DNA, 26 bp, Homo sapiens
ttttctcttggtattgcaagttggag

SEQ ID NO: 124579 - DNA, 26 bp, Homo sapiens
tttctcttggtattgcaagttggagt

SEQ ID NO: 124580 - DNA, 26 bp, Homo sapiens
ttctcttggtattgcaagttggagtt

SEQ ID NO: 124581 - DNA, 26 bp, Homo sapiens
tctcttggtattgcaagttggagttc

SEQ ID NO: 124582 - DNA, 26 bp, Homo sapiens
ctcttggtattgcaagttggagttca

SEQ ID NO: 124583 - DNA, 26 bp, Homo sapiens
tcttggtattgcaagttggagttcat

SEQ ID NO: 124584 - DNA, 26 bp, Homo sapiens
cttggtattgcaagttggagttcatc

SEQ ID NO: 124585 - DNA, 26 bp, Homo sapiens
ttggtattgcaagttggagttcatct

SEQ ID NO: 124586 - DNA, 26 bp, Homo sapiens
tggtattgcaagttggagttcatctc

SEQ ID NO: 124587 - DNA, 26 bp, Homo sapiens
ggtattgcaagttggagttcatctcc

SEQ ID NO: 124588 - DNA, 26 bp, Homo sapiens
gtattgcaagttggagttcatctcct

SEQ ID NO: 124589 - DNA, 26 bp, Homo sapiens
tattgcaagttggagttcatctcctt

SEQ ID NO: 124590 - DNA, 26 bp, Homo sapiens
attgcaagttggagttcatctccttc

SEQ ID NO: 124591 - DNA, 26 bp, Homo sapiens
ttgcaagttggagttcatctccttct

SEQ ID NO: 124592 - DNA, 26 bp, Homo sapiens
tgcaagttggagttcatctccttctt

SEQ ID NO: 124593 - DNA, 26 bp, Homo sapiens
gcaagttggagttcatctccttcttc

SEQ ID NO: 124594 - DNA, 26 bp, Homo sapiens
caagttggagttcatctccttcttcc

SEQ ID NO: 124595 - DNA, 26 bp, Homo sapiens
aagttggagttcatctccttcttcca

SEQ ID NO: 124596 - DNA, 26 bp, Homo sapiens
agttggagttcatctccttcttccag

SEQ ID NO: 124597 - DNA, 26 bp, Homo sapiens
gttggagttcatctccttcttccagt

SEQ ID NO: 124598 - DNA, 26 bp, Homo sapiens
ttggagttcatctccttcttccagtt

SEQ ID NO: 124599 - DNA, 26 bp, Homo sapiens
tggagttcatctccttcttccagttt

SEQ ID NO: 124600 - DNA, 26 bp, Homo sapiens
ggagttcatctccttcttccagtttt

SEQ ID NO: 124601 - DNA, 26 bp, Homo sapiens
gagttcatctccttcttccagttttg

SEQ ID NO: 124602 - DNA, 26 bp, Homo sapiens
agttcatctccttcttccagttttgc

SEQ ID NO: 124603 - DNA, 26 bp, Homo sapiens
gttcatctccttcttccagttttgca

SEQ ID NO: 124604 - DNA, 26 bp, Homo sapiens
ttcatctccttcttccagttttgcaa

SEQ ID NO: 124605 - DNA, 26 bp, Homo sapiens
tcatctccttcttccagttttgcaat

SEQ ID NO: 124606 - DNA, 26 bp, Homo sapiens
catctccttcttccagttttgcaatg

SEQ ID NO: 124607 - DNA, 26 bp, Homo sapiens
atctccttcttccagttttgcaatgc

SEQ ID NO: 124608 - DNA, 26 bp, Homo sapiens
tctccttcttccagttttgcaatgcc

SEQ ID NO: 124609 - DNA, 26 bp, Homo sapiens
ctccttcttccagttttgcaatgcca

SEQ ID NO: 124610 - DNA, 26 bp, Homo sapiens
tccttcttccagttttgcaatgccag

SEQ ID NO: 124611 - DNA, 26 bp, Homo sapiens
ccttcttccagttttgcaatgccagc

SEQ ID NO: 124612 - DNA, 26 bp, Homo sapiens
cttcttccagttttgcaatgccagct

SEQ ID NO: 124613 - DNA, 26 bp, Homo sapiens
ttcttccagttttgcaatgccagctg

SEQ ID NO: 124614 - DNA, 26 bp, Homo sapiens
tcttccagttttgcaatgccagctga

SEQ ID NO: 124615 - DNA, 26 bp, Homo sapiens
cttccagttttgcaatgccagctgaa

SEQ ID NO: 124616 - DNA, 26 bp, Homo sapiens
ttccagttttgcaatgccagctgaat

SEQ ID NO: 124617 - DNA, 26 bp, Homo sapiens
tccagttttgcaatgccagctgaata

SEQ ID NO: 124618 - DNA, 26 bp, Homo sapiens
ccagttttgcaatgccagctgaatag

SEQ ID NO: 124619 - DNA, 26 bp, Homo sapiens
cagttttgcaatgccagctgaatagc

SEQ ID NO: 124620 - DNA, 26 bp, Homo sapiens
agttttgcaatgccagctgaatagca

SEQ ID NO: 124621 - DNA, 26 bp, Homo sapiens
gttttgcaatgccagctgaatagcag

SEQ ID NO: 124622 - DNA, 26 bp, Homo sapiens
ttttgcaatgccagctgaatagcagg

SEQ ID NO: 124623 - DNA, 26 bp, Homo sapiens
tttgcaatgccagctgaatagcagga

SEQ ID NO: 124624 - DNA, 26 bp, Homo sapiens
ttgcaatgccagctgaatagcaggaa

SEQ ID NO: 124625 - DNA, 26 bp, Homo sapiens
tgcaatgccagctgaatagcaggaat

SEQ ID NO: 124626 - DNA, 26 bp, Homo sapiens
gcaatgccagctgaatagcaggaatt

SEQ ID NO: 124627 - DNA, 26 bp, Homo sapiens
caatgccagctgaatagcaggaatta

SEQ ID NO: 124628 - DNA, 26 bp, Homo sapiens
aatgccagctgaatagcaggaattat

SEQ ID NO: 124629 - DNA, 26 bp, Homo sapiens
atgccagctgaatagcaggaattatt

SEQ ID NO: 124630 - DNA, 26 bp, Homo sapiens
tgccagctgaatagcaggaattattg

SEQ ID NO: 124631 - DNA, 26 bp, Homo sapiens
gccagctgaatagcaggaattattgg

SEQ ID NO: 124632 - DNA, 26 bp, Homo sapiens
ccagctgaatagcaggaattattggg

SEQ ID NO: 124633 - DNA, 26 bp, Homo sapiens
cagctgaatagcaggaattattgggt

SEQ ID NO: 124634 - DNA, 26 bp, Homo sapiens
agctgaatagcaggaattattgggta

SEQ ID NO: 124635 - DNA, 26 bp, Homo sapiens
gctgaatagcaggaattattgggtag

SEQ ID NO: 124636 - DNA, 26 bp, Homo sapiens
ctgaatagcaggaattattgggtagt

SEQ ID NO: 124637 - DNA, 26 bp, Homo sapiens
tgaatagcaggaattattgggtagtg

SEQ ID NO: 124638 - DNA, 26 bp, Homo sapiens
gaatagcaggaattattgggtagtgt

SEQ ID NO: 124639 - DNA, 26 bp, Homo sapiens
aatagcaggaattattgggtagtgtt

SEQ ID NO: 124640 - DNA, 26 bp, Homo sapiens
atagcaggaattattgggtagtgttt

SEQ ID NO: 124641 - DNA, 26 bp, Homo sapiens
tagcaggaattattgggtagtgtttc

SEQ ID NO: 124642 - DNA, 26 bp, Homo sapiens
agcaggaattattgggtagtgtttca

SEQ ID NO: 124643 - DNA, 26 bp, Homo sapiens
gcaggaattattgggtagtgtttcag

SEQ ID NO: 124644 - DNA, 26 bp, Homo sapiens
caggaattattgggtagtgtttcagg

SEQ ID NO: 124645 - DNA, 26 bp, Homo sapiens
aggaattattgggtagtgtttcaggc

SEQ ID NO: 124646 - DNA, 26 bp, Homo sapiens
ggaattattgggtagtgtttcaggca

SEQ ID NO: 124647 - DNA, 26 bp, Homo sapiens
gaattattgggtagtgtttcaggcat

SEQ ID NO: 124648 - DNA, 26 bp, Homo sapiens
aattattgggtagtgtttcaggcata

SEQ ID NO: 124649 - DNA, 26 bp, Homo sapiens
attattgggtagtgtttcaggcatat

SEQ ID NO: 124650 - DNA, 26 bp, Homo sapiens
ttattgggtagtgtttcaggcatatt

SEQ ID NO: 124651 - DNA, 26 bp, Homo sapiens
tattgggtagtgtttcaggcatattt

SEQ ID NO: 124652 - DNA, 26 bp, Homo sapiens
attgggtagtgtttcaggcatatttt

SEQ ID NO: 124653 - DNA, 26 bp, Homo sapiens
ttgggtagtgtttcaggcatattttg

SEQ ID NO: 124654 - DNA, 26 bp, Homo sapiens
tgggtagtgtttcaggcatattttga

SEQ ID NO: 124655 - DNA, 26 bp, Homo sapiens
gggtagtgtttcaggcatattttgaa

SEQ ID NO: 124656 - DNA, 26 bp, Homo sapiens
ggtagtgtttcaggcatattttgaat

SEQ ID NO: 124657 - DNA, 26 bp, Homo sapiens
gtagtgtttcaggcatattttgaata

SEQ ID NO: 124658 - DNA, 26 bp, Homo sapiens
tagtgtttcaggcatattttgaatac

SEQ ID NO: 124659 - DNA, 26 bp, Homo sapiens
agtgtttcaggcatattttgaataca

SEQ ID NO: 124660 - DNA, 26 bp, Homo sapiens
gtgtttcaggcatattttgaatacat

SEQ ID NO: 124661 - DNA, 26 bp, Homo sapiens
tgtttcaggcatattttgaatacatc

SEQ ID NO: 124662 - DNA, 26 bp, Homo sapiens
gtttcaggcatattttgaatacatcg

SEQ ID NO: 124663 - DNA, 26 bp, Homo sapiens
tttcaggcatattttgaatacatcga

SEQ ID NO: 124664 - DNA, 26 bp, Homo sapiens
ttcaggcatattttgaatacatcgaa

SEQ ID NO: 124665 - DNA, 26 bp, Homo sapiens
tcaggcatattttgaatacatcgaaa

SEQ ID NO: 124666 - DNA, 26 bp, Homo sapiens
caggcatattttgaatacatcgaaac

SEQ ID NO: 124667 - DNA, 26 bp, Homo sapiens
aggcatattttgaatacatcgaaaca

SEQ ID NO: 124668 - DNA, 26 bp, Homo sapiens
ggcatattttgaatacatcgaaacaa

SEQ ID NO: 124669 - DNA, 26 bp, Homo sapiens
gcatattttgaatacatcgaaacaaa

SEQ ID NO: 124670 - DNA, 26 bp, Homo sapiens
catattttgaatacatcgaaacaaag

SEQ ID NO: 124671 - DNA, 26 bp, Homo sapiens
atattttgaatacatcgaaacaaagt

SEQ ID NO: 124672 - DNA, 26 bp, Homo sapiens
tattttgaatacatcgaaacaaagtc

SEQ ID NO: 124673 - DNA, 26 bp, Homo sapiens
attttgaatacatcgaaacaaagtca

SEQ ID NO: 124674 - DNA, 26 bp, Homo sapiens
ttttgaatacatcgaaacaaagtcac

SEQ ID NO: 124675 - DNA, 26 bp, Homo sapiens
tttgaatacatcgaaacaaagtcacc

SEQ ID NO: 124676 - DNA, 26 bp, Homo sapiens
ttgaatacatcgaaacaaagtcacca

SEQ ID NO: 124677 - DNA, 26 bp, Homo sapiens
tgaatacatcgaaacaaagtcaccag

SEQ ID NO: 124678 - DNA, 26 bp, Homo sapiens
gaatacatcgaaacaaagtcaccaga

SEQ ID NO: 124679 - DNA, 26 bp, Homo sapiens
aatacatcgaaacaaagtcaccagac

SEQ ID NO: 124680 - DNA, 26 bp, Homo sapiens
atacatcgaaacaaagtcaccagact

SEQ ID NO: 124681 - DNA, 26 bp, Homo sapiens
tacatcgaaacaaagtcaccagactc

SEQ ID NO: 124682 - DNA, 26 bp, Homo sapiens
acatcgaaacaaagtcaccagactca

SEQ ID NO: 124683 - DNA, 26 bp, Homo sapiens
catcgaaacaaagtcaccagactcaa

SEQ ID NO: 124684 - DNA, 26 bp, Homo sapiens
atcgaaacaaagtcaccagactcaat

SEQ ID NO: 124685 - DNA, 26 bp, Homo sapiens
tcgaaacaaagtcaccagactcaatt

SEQ ID NO: 124686 - DNA, 26 bp, Homo sapiens
cgaaacaaagtcaccagactcaattc

SEQ ID NO: 124687 - DNA, 26 bp, Homo sapiens
gaaacaaagtcaccagactcaattca

SEQ ID NO: 124688 - DNA, 26 bp, Homo sapiens
aaacaaagtcaccagactcaattcat

SEQ ID NO: 124689 - DNA, 26 bp, Homo sapiens
aacaaagtcaccagactcaattcatc

SEQ ID NO: 124690 - DNA, 26 bp, Homo sapiens
acaaagtcaccagactcaattcatcc

SEQ ID NO: 124691 - DNA, 26 bp, Homo sapiens
caaagtcaccagactcaattcatccc

SEQ ID NO: 124692 - DNA, 26 bp, Homo sapiens
aaagtcaccagactcaattcatcccc

SEQ ID NO: 124693 - DNA, 26 bp, Homo sapiens
aagtcaccagactcaattcatcccca

SEQ ID NO: 124694 - DNA, 26 bp, Homo sapiens
agtcaccagactcaattcatccccaa

SEQ ID NO: 124695 - DNA, 26 bp, Homo sapiens
gtcaccagactcaattcatccccaaa

SEQ ID NO: 124696 - DNA, 26 bp, Homo sapiens
tcaccagactcaattcatccccaaag

SEQ ID NO: 124697 - DNA, 26 bp, Homo sapiens
caccagactcaattcatccccaaaga

SEQ ID NO: 124698 - DNA, 26 bp, Homo sapiens
accagactcaattcatccccaaagac

SEQ ID NO: 124699 - DNA, 26 bp, Homo sapiens
ccagactcaattcatccccaaagaca

SEQ ID NO: 124700 - DNA, 26 bp, Homo sapiens
cagactcaattcatccccaaagacat

SEQ ID NO: 124701 - DNA, 26 bp, Homo sapiens
agactcaattcatccccaaagacatg

SEQ ID NO: 124702 - DNA, 26 bp, Homo sapiens
gactcaattcatccccaaagacatgg

SEQ ID NO: 124703 - DNA, 26 bp, Homo sapiens
actcaattcatccccaaagacatgga

SEQ ID NO: 124704 - DNA, 26 bp, Homo sapiens
ctcaattcatccccaaagacatggac

SEQ ID NO: 124705 - DNA, 26 bp, Homo sapiens
tcaattcatccccaaagacatggacc

SEQ ID NO: 124706 - DNA, 26 bp, Homo sapiens
caattcatccccaaagacatggacct

SEQ ID NO: 124707 - DNA, 26 bp, Homo sapiens
aattcatccccaaagacatggacctt

SEQ ID NO: 124708 - DNA, 26 bp, Homo sapiens
attcatccccaaagacatggaccttc

SEQ ID NO: 124709 - DNA, 26 bp, Homo sapiens
ttcatccccaaagacatggaccttct

SEQ ID NO: 124710 - DNA, 26 bp, Homo sapiens
tcatccccaaagacatggaccttctt

SEQ ID NO: 124711 - DNA, 26 bp, Homo sapiens
catccccaaagacatggaccttcttc

SEQ ID NO: 124712 - DNA, 26 bp, Homo sapiens
atccccaaagacatggaccttcttcc

SEQ ID NO: 124713 - DNA, 26 bp, Homo sapiens
tccccaaagacatggaccttcttcct

SEQ ID NO: 124714 - DNA, 26 bp, Homo sapiens
ccccaaagacatggaccttcttcctc

SEQ ID NO: 124715 - DNA, 26 bp, Homo sapiens
cccaaagacatggaccttcttcctct

SEQ ID NO: 124716 - DNA, 26 bp, Homo sapiens
ccaaagacatggaccttcttcctctg

SEQ ID NO: 124717 - DNA, 26 bp, Homo sapiens
caaagacatggaccttcttcctctga

SEQ ID NO: 124718 - DNA, 26 bp, Homo sapiens
aaagacatggaccttcttcctctgaa

SEQ ID NO: 124719 - DNA, 26 bp, Homo sapiens
aagacatggaccttcttcctctgaat

SEQ ID NO: 124720 - DNA, 26 bp, Homo sapiens
agacatggaccttcttcctctgaatt

SEQ ID NO: 124721 - DNA, 26 bp, Homo sapiens
gacatggaccttcttcctctgaatta

SEQ ID NO: 124722 - DNA, 26 bp, Homo sapiens
acatggaccttcttcctctgaattag

SEQ ID NO: 124723 - DNA, 26 bp, Homo sapiens
catggaccttcttcctctgaattaga

SEQ ID NO: 124724 - DNA, 26 bp, Homo sapiens
atggaccttcttcctctgaattagat

SEQ ID NO: 124725 - DNA, 26 bp, Homo sapiens
tggaccttcttcctctgaattagatg

SEQ ID NO: 124726 - DNA, 26 bp, Homo sapiens
ggaccttcttcctctgaattagatgt

SEQ ID NO: 124727 - DNA, 26 bp, Homo sapiens
gaccttcttcctctgaattagatgtc

SEQ ID NO: 124728 - DNA, 26 bp, Homo sapiens
accttcttcctctgaattagatgtcc

SEQ ID NO: 124729 - DNA, 26 bp, Homo sapiens
ccttcttcctctgaattagatgtccc

SEQ ID NO: 124730 - DNA, 26 bp, Homo sapiens
cttcttcctctgaattagatgtccca

SEQ ID NO: 124731 - DNA, 26 bp, Homo sapiens
ttcttcctctgaattagatgtcccat

SEQ ID NO: 124732 - DNA, 26 bp, Homo sapiens
tcttcctctgaattagatgtcccatg

SEQ ID NO: 124733 - DNA, 26 bp, Homo sapiens
cttcctctgaattagatgtcccatgg

SEQ ID NO: 124734 - DNA, 26 bp, Homo sapiens
ttcctctgaattagatgtcccatggc

SEQ ID NO: 124735 - DNA, 26 bp, Homo sapiens
tcctctgaattagatgtcccatggcg

SEQ ID NO: 124736 - DNA, 26 bp, Homo sapiens
cctctgaattagatgtcccatggcgt

SEQ ID NO: 124737 - DNA, 26 bp, Homo sapiens
ctctgaattagatgtcccatggcgta

SEQ ID NO: 124738 - DNA, 26 bp, Homo sapiens
tctgaattagatgtcccatggcgtag

SEQ ID NO: 124739 - DNA, 26 bp, Homo sapiens
ctgaattagatgtcccatggcgtagg

SEQ ID NO: 124740 - DNA, 26 bp, Homo sapiens
tgaattagatgtcccatggcgtaggt

SEQ ID NO: 124741 - DNA, 26 bp, Homo sapiens
gaattagatgtcccatggcgtaggtc

SEQ ID NO: 124742 - DNA, 26 bp, Homo sapiens
aattagatgtcccatggcgtaggtct

SEQ ID NO: 124743 - DNA, 26 bp, Homo sapiens
attagatgtcccatggcgtaggtctt

SEQ ID NO: 124744 - DNA, 26 bp, Homo sapiens
ttagatgtcccatggcgtaggtctta

SEQ ID NO: 124745 - DNA, 26 bp, Homo sapiens
tagatgtcccatggcgtaggtcttat

SEQ ID NO: 124746 - DNA, 26 bp, Homo sapiens
agatgtcccatggcgtaggtcttatc

SEQ ID NO: 124747 - DNA, 26 bp, Homo sapiens
gatgtcccatggcgtaggtcttatca

SEQ ID NO: 124748 - DNA, 26 bp, Homo sapiens
atgtcccatggcgtaggtcttatcag

SEQ ID NO: 124749 - DNA, 26 bp, Homo sapiens
tgtcccatggcgtaggtcttatcagt

SEQ ID NO: 124750 - DNA, 26 bp, Homo sapiens
gtcccatggcgtaggtcttatcagta

SEQ ID NO: 124751 - DNA, 26 bp, Homo sapiens
tcccatggcgtaggtcttatcagtat

SEQ ID NO: 124752 - DNA, 26 bp, Homo sapiens
cccatggcgtaggtcttatcagtata

SEQ ID NO: 124753 - DNA, 26 bp, Homo sapiens
ccatggcgtaggtcttatcagtatat

SEQ ID NO: 124754 - DNA, 26 bp, Homo sapiens
catggcgtaggtcttatcagtatata

SEQ ID NO: 124755 - DNA, 26 bp, Homo sapiens
atggcgtaggtcttatcagtatataa

SEQ ID NO: 124756 - DNA, 26 bp, Homo sapiens
tggcgtaggtcttatcagtatataaa

SEQ ID NO: 124757 - DNA, 26 bp, Homo sapiens
ggcgtaggtcttatcagtatataaaa

SEQ ID NO: 124758 - DNA, 26 bp, Homo sapiens
gcgtaggtcttatcagtatataaaac

SEQ ID NO: 124759 - DNA, 26 bp, Homo sapiens
cgtaggtcttatcagtatataaaacc

SEQ ID NO: 124760 - DNA, 26 bp, Homo sapiens
gtaggtcttatcagtatataaaacct

SEQ ID NO: 124761 - DNA, 26 bp, Homo sapiens
taggtcttatcagtatataaaacctg

SEQ ID NO: 124762 - DNA, 26 bp, Homo sapiens
aggtcttatcagtatataaaacctga

SEQ ID NO: 124763 - DNA, 26 bp, Homo sapiens
ggtcttatcagtatataaaacctgac

SEQ ID NO: 124764 - DNA, 26 bp, Homo sapiens
gtcttatcagtatataaaacctgacc

SEQ ID NO: 124765 - DNA, 26 bp, Homo sapiens
tcttatcagtatataaaacctgacca

SEQ ID NO: 124766 - DNA, 26 bp, Homo sapiens
cttatcagtatataaaacctgaccat

SEQ ID NO: 124767 - DNA, 26 bp, Homo sapiens
ttatcagtatataaaacctgaccata

SEQ ID NO: 124768 - DNA, 26 bp, Homo sapiens
tatcagtatataaaacctgaccatat

SEQ ID NO: 124769 - DNA, 26 bp, Homo sapiens
atcagtatataaaacctgaccatata

SEQ ID NO: 124770 - DNA, 26 bp, Homo sapiens
tcagtatataaaacctgaccatatat

SEQ ID NO: 124771 - DNA, 26 bp, Homo sapiens
cagtatataaaacctgaccatatata

SEQ ID NO: 124772 - DNA, 26 bp, Homo sapiens
agtatataaaacctgaccatatataa

SEQ ID NO: 124773 - DNA, 26 bp, Homo sapiens
gtatataaaacctgaccatatataaa

SEQ ID NO: 124774 - DNA, 26 bp, Homo sapiens
tatataaaacctgaccatatataaaa

SEQ ID NO: 124775 - DNA, 26 bp, Homo sapiens
atataaaacctgaccatatataaaaa

SEQ ID NO: 124776 - DNA, 26 bp, Homo sapiens
tataaaacctgaccatatataaaaaa

SEQ ID NO: 124777 - DNA, 26 bp, Homo sapiens
ataaaacctgaccatatataaaaaag

SEQ ID NO: 124778 - DNA, 26 bp, Homo sapiens
taaaacctgaccatatataaaaaagt

SEQ ID NO: 124779 - DNA, 26 bp, Homo sapiens
aaaacctgaccatatataaaaaagta

SEQ ID NO: 124780 - DNA, 26 bp, Homo sapiens
aaacctgaccatatataaaaaagtaa

SEQ ID NO: 124781 - DNA, 26 bp, Homo sapiens
aacctgaccatatataaaaaagtaac

SEQ ID NO: 124782 - DNA, 26 bp, Homo sapiens
acctgaccatatataaaaaagtaacc

SEQ ID NO: 124783 - DNA, 26 bp, Homo sapiens
cctgaccatatataaaaaagtaacca

SEQ ID NO: 124784 - DNA, 26 bp, Homo sapiens
ctgaccatatataaaaaagtaaccag

SEQ ID NO: 124785 - DNA, 26 bp, Homo sapiens
tgaccatatataaaaaagtaaccagt

SEQ ID NO: 124786 - DNA, 26 bp, Homo sapiens
gaccatatataaaaaagtaaccagtt

SEQ ID NO: 124787 - DNA, 26 bp, Homo sapiens
accatatataaaaaagtaaccagttt

SEQ ID NO: 124788 - DNA, 26 bp, Homo sapiens
ccatatataaaaaagtaaccagtttc

SEQ ID NO: 124789 - DNA, 26 bp, Homo sapiens
catatataaaaaagtaaccagtttct

SEQ ID NO: 124790 - DNA, 26 bp, Homo sapiens
atatataaaaaagtaaccagtttctt

SEQ ID NO: 124791 - DNA, 26 bp, Homo sapiens
tatataaaaaagtaaccagtttcttt

SEQ ID NO: 124792 - DNA, 26 bp, Homo sapiens
atataaaaaagtaaccagtttctttg

SEQ ID NO: 124793 - DNA, 26 bp, Homo sapiens
tataaaaaagtaaccagtttctttga

SEQ ID NO: 124794 - DNA, 26 bp, Homo sapiens
ataaaaaagtaaccagtttctttgac

SEQ ID NO: 124795 - DNA, 26 bp, Homo sapiens
taaaaaagtaaccagtttctttgacc

SEQ ID NO: 124796 - DNA, 26 bp, Homo sapiens
aaaaaagtaaccagtttctttgacca

SEQ ID NO: 124797 - DNA, 26 bp, Homo sapiens
aaaaagtaaccagtttctttgaccaa

SEQ ID NO: 124798 - DNA, 26 bp, Homo sapiens
aaaagtaaccagtttctttgaccaat

SEQ ID NO: 124799 - DNA, 26 bp, Homo sapiens
aaagtaaccagtttctttgaccaata

SEQ ID NO: 124800 - DNA, 26 bp, Homo sapiens
aagtaaccagtttctttgaccaatat

SEQ ID NO: 124801 - DNA, 26 bp, Homo sapiens
agtaaccagtttctttgaccaatatt

SEQ ID NO: 124802 - DNA, 26 bp, Homo sapiens
gtaaccagtttctttgaccaatattt

SEQ ID NO: 124803 - DNA, 26 bp, Homo sapiens
taaccagtttctttgaccaatatttt

SEQ ID NO: 124804 - DNA, 26 bp, Homo sapiens
aaccagtttctttgaccaatatttta

SEQ ID NO: 124805 - DNA, 26 bp, Homo sapiens
accagtttctttgaccaatattttat

SEQ ID NO: 124806 - DNA, 26 bp, Homo sapiens
ccagtttctttgaccaatattttatt

SEQ ID NO: 124807 - DNA, 26 bp, Homo sapiens
cagtttctttgaccaatattttattc

SEQ ID NO: 124808 - DNA, 26 bp, Homo sapiens
agtttctttgaccaatattttattct

SEQ ID NO: 124809 - DNA, 26 bp, Homo sapiens
gtttctttgaccaatattttattctc

SEQ ID NO: 124810 - DNA, 26 bp, Homo sapiens
tttctttgaccaatattttattctct

SEQ ID NO: 124811 - DNA, 26 bp, Homo sapiens
ttctttgaccaatattttattctctt

SEQ ID NO: 124812 - DNA, 26 bp, Homo sapiens
tctttgaccaatattttattctcttt

SEQ ID NO: 124813 - DNA, 26 bp, Homo sapiens
ctttgaccaatattttattctctttt

SEQ ID NO: 124814 - DNA, 26 bp, Homo sapiens
tttgaccaatattttattctcttttt

SEQ ID NO: 124815 - DNA, 26 bp, Homo sapiens
ttgaccaatattttattctctttttc

SEQ ID NO: 124816 - DNA, 26 bp, Homo sapiens
tgaccaatattttattctctttttct

SEQ ID NO: 124817 - DNA, 26 bp, Homo sapiens
gaccaatattttattctctttttctt

SEQ ID NO: 124818 - DNA, 26 bp, Homo sapiens
accaatattttattctctttttcttc

SEQ ID NO: 124819 - DNA, 26 bp, Homo sapiens
ccaatattttattctctttttcttct

SEQ ID NO: 124820 - DNA, 26 bp, Homo sapiens
caatattttattctctttttcttcta

SEQ ID NO: 124821 - DNA, 26 bp, Homo sapiens
aatattttattctctttttcttctag

SEQ ID NO: 124822 - DNA, 26 bp, Homo sapiens
atattttattctctttttcttctagg

SEQ ID NO: 124823 - DNA, 26 bp, Homo sapiens
tattttattctctttttcttctaggg

SEQ ID NO: 124824 - DNA, 26 bp, Homo sapiens
attttattctctttttcttctagggc

SEQ ID NO: 124825 - DNA, 26 bp, Homo sapiens
ttttattctctttttcttctagggca

SEQ ID NO: 124826 - DNA, 26 bp, Homo sapiens
tttattctctttttcttctagggcac

SEQ ID NO: 124827 - DNA, 26 bp, Homo sapiens
ttattctctttttcttctagggcact

SEQ ID NO: 124828 - DNA, 26 bp, Homo sapiens
tattctctttttcttctagggcactt

SEQ ID NO: 124829 - DNA, 26 bp, Homo sapiens
attctctttttcttctagggcacttc

SEQ ID NO: 124830 - DNA, 26 bp, Homo sapiens
ttctctttttcttctagggcacttcc

SEQ ID NO: 124831 - DNA, 26 bp, Homo sapiens
tctctttttcttctagggcacttccc

SEQ ID NO: 124832 - DNA, 26 bp, Homo sapiens
ctctttttcttctagggcacttcccc

SEQ ID NO: 124833 - DNA, 26 bp, Homo sapiens
tctttttcttctagggcacttcccct

SEQ ID NO: 124834 - DNA, 26 bp, Homo sapiens
ctttttcttctagggcacttcccctt

SEQ ID NO: 124835 - DNA, 26 bp, Homo sapiens
tttttcttctagggcacttccccttt

SEQ ID NO: 124836 - DNA, 26 bp, Homo sapiens
ttttcttctagggcacttcccctttt

SEQ ID NO: 124837 - DNA, 26 bp, Homo sapiens
tttcttctagggcacttcccctttta

SEQ ID NO: 124838 - DNA, 26 bp, Homo sapiens
ttcttctagggcacttccccttttaa

SEQ ID NO: 124839 - DNA, 26 bp, Homo sapiens
tcttctagggcacttccccttttaaa

SEQ ID NO: 124840 - DNA, 26 bp, Homo sapiens
cttctagggcacttccccttttaaag

SEQ ID NO: 124841 - DNA, 26 bp, Homo sapiens
ttctagggcacttccccttttaaagc

SEQ ID NO: 124842 - DNA, 26 bp, Homo sapiens
tctagggcacttccccttttaaagct

SEQ ID NO: 124843 - DNA, 26 bp, Homo sapiens
ctagggcacttccccttttaaagctg

SEQ ID NO: 124844 - DNA, 26 bp, Homo sapiens
tagggcacttccccttttaaagctga

SEQ ID NO: 124845 - DNA, 26 bp, Homo sapiens
agggcacttccccttttaaagctgag

SEQ ID NO: 124846 - DNA, 26 bp, Homo sapiens
gggcacttccccttttaaagctgaga

SEQ ID NO: 124847 - DNA, 26 bp, Homo sapiens
ggcacttccccttttaaagctgagaa

SEQ ID NO: 124848 - DNA, 26 bp, Homo sapiens
gcacttccccttttaaagctgagaag

SEQ ID NO: 124849 - DNA, 26 bp, Homo sapiens
cacttccccttttaaagctgagaagc

SEQ ID NO: 124850 - DNA, 26 bp, Homo sapiens
acttccccttttaaagctgagaagcc

SEQ ID NO: 124851 - DNA, 26 bp, Homo sapiens
cttccccttttaaagctgagaagcca

SEQ ID NO: 124852 - DNA, 26 bp, Homo sapiens
ttccccttttaaagctgagaagccat

SEQ ID NO: 124853 - DNA, 26 bp, Homo sapiens
tccccttttaaagctgagaagccatg

SEQ ID NO: 124854 - DNA, 26 bp, Homo sapiens
ccccttttaaagctgagaagccatgg

SEQ ID NO: 124855 - DNA, 26 bp, Homo sapiens
cccttttaaagctgagaagccatgga

SEQ ID NO: 124856 - DNA, 26 bp, Homo sapiens
ccttttaaagctgagaagccatggaa

SEQ ID NO: 124857 - DNA, 26 bp, Homo sapiens
cttttaaagctgagaagccatggaac

SEQ ID NO: 124858 - DNA, 26 bp, Homo sapiens
ttttaaagctgagaagccatggaaca

SEQ ID NO: 124859 - DNA, 26 bp, Homo sapiens
tttaaagctgagaagccatggaacaa

SEQ ID NO: 124860 - DNA, 26 bp, Homo sapiens
ttaaagctgagaagccatggaacaaa

SEQ ID NO: 124861 - DNA, 26 bp, Homo sapiens
taaagctgagaagccatggaacaaat

SEQ ID NO: 124862 - DNA, 26 bp, Homo sapiens
aaagctgagaagccatggaacaaatg

SEQ ID NO: 124863 - DNA, 26 bp, Homo sapiens
aagctgagaagccatggaacaaatgt

SEQ ID NO: 124864 - DNA, 26 bp, Homo sapiens
agctgagaagccatggaacaaatgtg

SEQ ID NO: 124865 - DNA, 26 bp, Homo sapiens
gctgagaagccatggaacaaatgtgt

SEQ ID NO: 124866 - DNA, 26 bp, Homo sapiens
ctgagaagccatggaacaaatgtgta

SEQ ID NO: 124867 - DNA, 26 bp, Homo sapiens
tgagaagccatggaacaaatgtgtaa

SEQ ID NO: 124868 - DNA, 26 bp, Homo sapiens
gagaagccatggaacaaatgtgtaag

SEQ ID NO: 124869 - DNA, 26 bp, Homo sapiens
agaagccatggaacaaatgtgtaaga

SEQ ID NO: 124870 - DNA, 26 bp, Homo sapiens
gaagccatggaacaaatgtgtaagat

SEQ ID NO: 124871 - DNA, 26 bp, Homo sapiens
aagccatggaacaaatgtgtaagatc

SEQ ID NO: 124872 - DNA, 26 bp, Homo sapiens
agccatggaacaaatgtgtaagatcc

SEQ ID NO: 124873 - DNA, 26 bp, Homo sapiens
gccatggaacaaatgtgtaagatcct

SEQ ID NO: 124874 - DNA, 26 bp, Homo sapiens
ccatggaacaaatgtgtaagatcctt

SEQ ID NO: 124875 - DNA, 26 bp, Homo sapiens
catggaacaaatgtgtaagatccttt

SEQ ID NO: 124876 - DNA, 26 bp, Homo sapiens
atggaacaaatgtgtaagatcctttt

SEQ ID NO: 124877 - DNA, 26 bp, Homo sapiens
tggaacaaatgtgtaagatccttttt

SEQ ID NO: 124878 - DNA, 26 bp, Homo sapiens
ggaacaaatgtgtaagatcctttttg

SEQ ID NO: 124879 - DNA, 26 bp, Homo sapiens
gaacaaatgtgtaagatcctttttgt

SEQ ID NO: 124880 - DNA, 26 bp, Homo sapiens
aacaaatgtgtaagatcctttttgta

SEQ ID NO: 124881 - DNA, 26 bp, Homo sapiens
acaaatgtgtaagatcctttttgtat

SEQ ID NO: 124882 - DNA, 26 bp, Homo sapiens
caaatgtgtaagatcctttttgtata

SEQ ID NO: 124883 - DNA, 26 bp, Homo sapiens
aaatgtgtaagatcctttttgtatag

SEQ ID NO: 124884 - DNA, 26 bp, Homo sapiens
aatgtgtaagatcctttttgtatagt

SEQ ID NO: 124885 - DNA, 26 bp, Homo sapiens
atgtgtaagatcctttttgtatagtt

SEQ ID NO: 124886 - DNA, 26 bp, Homo sapiens
tgtgtaagatcctttttgtatagttg

SEQ ID NO: 124887 - DNA, 26 bp, Homo sapiens
gtgtaagatcctttttgtatagttgg

SEQ ID NO: 124888 - DNA, 26 bp, Homo sapiens
tgtaagatcctttttgtatagttggt

SEQ ID NO: 124889 - DNA, 26 bp, Homo sapiens
gtaagatcctttttgtatagttggtg

SEQ ID NO: 124890 - DNA, 26 bp, Homo sapiens
taagatcctttttgtatagttggtgt

SEQ ID NO: 124891 - DNA, 26 bp, Homo sapiens
aagatcctttttgtatagttggtgtt

SEQ ID NO: 124892 - DNA, 26 bp, Homo sapiens
agatcctttttgtatagttggtgttt

SEQ ID NO: 124893 - DNA, 26 bp, Homo sapiens
gatcctttttgtatagttggtgtttc

SEQ ID NO: 124894 - DNA, 26 bp, Homo sapiens
atcctttttgtatagttggtgtttca

SEQ ID NO: 124895 - DNA, 26 bp, Homo sapiens
tcctttttgtatagttggtgtttcac

SEQ ID NO: 124896 - DNA, 26 bp, Homo sapiens
cctttttgtatagttggtgtttcact

SEQ ID NO: 124897 - DNA, 26 bp, Homo sapiens
ctttttgtatagttggtgtttcactg

SEQ ID NO: 124898 - DNA, 26 bp, Homo sapiens
tttttgtatagttggtgtttcactgt

SEQ ID NO: 124899 - DNA, 26 bp, Homo sapiens
ttttgtatagttggtgtttcactgtc

SEQ ID NO: 124900 - DNA, 26 bp, Homo sapiens
tttgtatagttggtgtttcactgtct

SEQ ID NO: 124901 - DNA, 26 bp, Homo sapiens
ttgtatagttggtgtttcactgtctg

SEQ ID NO: 124902 - DNA, 26 bp, Homo sapiens
tgtatagttggtgtttcactgtctgc

SEQ ID NO: 124903 - DNA, 26 bp, Homo sapiens
gtatagttggtgtttcactgtctgca

SEQ ID NO: 124904 - DNA, 26 bp, Homo sapiens
tatagttggtgtttcactgtctgcaa

SEQ ID NO: 124905 - DNA, 26 bp, Homo sapiens
atagttggtgtttcactgtctgcaat

SEQ ID NO: 124906 - DNA, 26 bp, Homo sapiens
tagttggtgtttcactgtctgcaatc

SEQ ID NO: 124907 - DNA, 26 bp, Homo sapiens
agttggtgtttcactgtctgcaatca

SEQ ID NO: 124908 - DNA, 26 bp, Homo sapiens
gttggtgtttcactgtctgcaatcag

SEQ ID NO: 124909 - DNA, 26 bp, Homo sapiens
ttggtgtttcactgtctgcaatcagt

SEQ ID NO: 124910 - DNA, 26 bp, Homo sapiens
tggtgtttcactgtctgcaatcagtt

SEQ ID NO: 124911 - DNA, 26 bp, Homo sapiens
ggtgtttcactgtctgcaatcagttg

SEQ ID NO: 124912 - DNA, 26 bp, Homo sapiens
gtgtttcactgtctgcaatcagttgc

SEQ ID NO: 124913 - DNA, 26 bp, Homo sapiens
tgtttcactgtctgcaatcagttgca

SEQ ID NO: 124914 - DNA, 26 bp, Homo sapiens
gtttcactgtctgcaatcagttgcaa

SEQ ID NO: 124915 - DNA, 26 bp, Homo sapiens
tttcactgtctgcaatcagttgcaag

SEQ ID NO: 124916 - DNA, 26 bp, Homo sapiens
ttcactgtctgcaatcagttgcaagc

SEQ ID NO: 124917 - DNA, 26 bp, Homo sapiens
tcactgtctgcaatcagttgcaagca

SEQ ID NO: 124918 - DNA, 26 bp, Homo sapiens
cactgtctgcaatcagttgcaagcag

SEQ ID NO: 124919 - DNA, 26 bp, Homo sapiens
actgtctgcaatcagttgcaagcagt

SEQ ID NO: 124920 - DNA, 26 bp, Homo sapiens
ctgtctgcaatcagttgcaagcagtc

SEQ ID NO: 124921 - DNA, 26 bp, Homo sapiens
tgtctgcaatcagttgcaagcagtct

SEQ ID NO: 124922 - DNA, 26 bp, Homo sapiens
gtctgcaatcagttgcaagcagtctt

SEQ ID NO: 124923 - DNA, 26 bp, Homo sapiens
tctgcaatcagttgcaagcagtcttg

SEQ ID NO: 124924 - DNA, 26 bp, Homo sapiens
ctgcaatcagttgcaagcagtcttga

SEQ ID NO: 124925 - DNA, 26 bp, Homo sapiens
tgcaatcagttgcaagcagtcttgag

SEQ ID NO: 124926 - DNA, 26 bp, Homo sapiens
gcaatcagttgcaagcagtcttgagt

SEQ ID NO: 124927 - DNA, 26 bp, Homo sapiens
caatcagttgcaagcagtcttgagtg

SEQ ID NO: 124928 - DNA, 26 bp, Homo sapiens
aatcagttgcaagcagtcttgagtga

SEQ ID NO: 124929 - DNA, 26 bp, Homo sapiens
atcagttgcaagcagtcttgagtgac

SEQ ID NO: 124930 - DNA, 26 bp, Homo sapiens
tcagttgcaagcagtcttgagtgact

SEQ ID NO: 124931 - DNA, 26 bp, Homo sapiens
cagttgcaagcagtcttgagtgactg

SEQ ID NO: 124932 - DNA, 26 bp, Homo sapiens
agttgcaagcagtcttgagtgactgt

SEQ ID NO: 124933 - DNA, 26 bp, Homo sapiens
gttgcaagcagtcttgagtgactgtt

SEQ ID NO: 124934 - DNA, 26 bp, Homo sapiens
ttgcaagcagtcttgagtgactgttt

SEQ ID NO: 124935 - DNA, 26 bp, Homo sapiens
tgcaagcagtcttgagtgactgtttc

SEQ ID NO: 124936 - DNA, 26 bp, Homo sapiens
gcaagcagtcttgagtgactgtttct

SEQ ID NO: 124937 - DNA, 26 bp, Homo sapiens
caagcagtcttgagtgactgtttctt

SEQ ID NO: 124938 - DNA, 26 bp, Homo sapiens
aagcagtcttgagtgactgtttcttc

SEQ ID NO: 124939 - DNA, 26 bp, Homo sapiens
agcagtcttgagtgactgtttcttct

SEQ ID NO: 124940 - DNA, 26 bp, Homo sapiens
gcagtcttgagtgactgtttcttctg

SEQ ID NO: 124941 - DNA, 26 bp, Homo sapiens
cagtcttgagtgactgtttcttctgg

SEQ ID NO: 124942 - DNA, 26 bp, Homo sapiens
agtcttgagtgactgtttcttctgga

SEQ ID NO: 124943 - DNA, 26 bp, Homo sapiens
gtcttgagtgactgtttcttctggac

SEQ ID NO: 124944 - DNA, 26 bp, Homo sapiens
tcttgagtgactgtttcttctggacc

SEQ ID NO: 124945 - DNA, 26 bp, Homo sapiens
cttgagtgactgtttcttctggaccc

SEQ ID NO: 124946 - DNA, 26 bp, Homo sapiens
ttgagtgactgtttcttctggaccct

SEQ ID NO: 124947 - DNA, 26 bp, Homo sapiens
tgagtgactgtttcttctggaccctg

SEQ ID NO: 124948 - DNA, 26 bp, Homo sapiens
gagtgactgtttcttctggaccctga

SEQ ID NO: 124949 - DNA, 26 bp, Homo sapiens
agtgactgtttcttctggaccctgaa

SEQ ID NO: 124950 - DNA, 26 bp, Homo sapiens
gtgactgtttcttctggaccctgaac

SEQ ID NO: 124951 - DNA, 26 bp, Homo sapiens
tgactgtttcttctggaccctgaacg

SEQ ID NO: 124952 - DNA, 26 bp, Homo sapiens
gactgtttcttctggaccctgaacgg

SEQ ID NO: 124953 - DNA, 26 bp, Homo sapiens
actgtttcttctggaccctgaacggc

SEQ ID NO: 124954 - DNA, 26 bp, Homo sapiens
ctgtttcttctggaccctgaacggca

SEQ ID NO: 124955 - DNA, 26 bp, Homo sapiens
tgtttcttctggaccctgaacggcac

SEQ ID NO: 124956 - DNA, 26 bp, Homo sapiens
gtttcttctggaccctgaacggcacg

SEQ ID NO: 124957 - DNA, 26 bp, Homo sapiens
tttcttctggaccctgaacggcacgc

SEQ ID NO: 124958 - DNA, 26 bp, Homo sapiens
ttcttctggaccctgaacggcacgct

SEQ ID NO: 124959 - DNA, 26 bp, Homo sapiens
tcttctggaccctgaacggcacgctt

SEQ ID NO: 124960 - DNA, 26 bp, Homo sapiens
cttctggaccctgaacggcacgctta

SEQ ID NO: 124961 - DNA, 26 bp, Homo sapiens
ttctggaccctgaacggcacgcttat

SEQ ID NO: 124962 - DNA, 26 bp, Homo sapiens
tctggaccctgaacggcacgcttatt

SEQ ID NO: 124963 - DNA, 26 bp, Homo sapiens
ctggaccctgaacggcacgcttattt

SEQ ID NO: 124964 - DNA, 26 bp, Homo sapiens
tggaccctgaacggcacgcttatttc

SEQ ID NO: 124965 - DNA, 26 bp, Homo sapiens
ggaccctgaacggcacgcttatttct

SEQ ID NO: 124966 - DNA, 26 bp, Homo sapiens
gaccctgaacggcacgcttatttctg

SEQ ID NO: 124967 - DNA, 26 bp, Homo sapiens
accctgaacggcacgcttatttctgc

SEQ ID NO: 124968 - DNA, 26 bp, Homo sapiens
ccctgaacggcacgcttatttctgct

SEQ ID NO: 124969 - DNA, 26 bp, Homo sapiens
cctgaacggcacgcttatttctgctg

SEQ ID NO: 124970 - DNA, 26 bp, Homo sapiens
ctgaacggcacgcttatttctgctgt

SEQ ID NO: 124971 - DNA, 26 bp, Homo sapiens
tgaacggcacgcttatttctgctgtt

SEQ ID NO: 124972 - DNA, 26 bp, Homo sapiens
gaacggcacgcttatttctgctgttc

SEQ ID NO: 124973 - DNA, 26 bp, Homo sapiens
aacggcacgcttatttctgctgttct

SEQ ID NO: 124974 - DNA, 26 bp, Homo sapiens
acggcacgcttatttctgctgttctg

SEQ ID NO: 124975 - DNA, 26 bp, Homo sapiens
cggcacgcttatttctgctgttctga

SEQ ID NO: 124976 - DNA, 26 bp, Homo sapiens
ggcacgcttatttctgctgttctgac

SEQ ID NO: 124977 - DNA, 26 bp, Homo sapiens
gcacgcttatttctgctgttctgact

SEQ ID NO: 124978 - DNA, 26 bp, Homo sapiens
cacgcttatttctgctgttctgactg

SEQ ID NO: 124979 - DNA, 26 bp, Homo sapiens
acgcttatttctgctgttctgactgg

SEQ ID NO: 124980 - DNA, 26 bp, Homo sapiens
cgcttatttctgctgttctgactgga

SEQ ID NO: 124981 - DNA, 26 bp, Homo sapiens
gcttatttctgctgttctgactggag

SEQ ID NO: 124982 - DNA, 26 bp, Homo sapiens
cttatttctgctgttctgactggagt

SEQ ID NO: 124983 - DNA, 26 bp, Homo sapiens
ttatttctgctgttctgactggagtt

SEQ ID NO: 124984 - DNA, 26 bp, Homo sapiens
tatttctgctgttctgactggagttg

SEQ ID NO: 124985 - DNA, 26 bp, Homo sapiens
atttctgctgttctgactggagttgc

SEQ ID NO: 124986 - DNA, 26 bp, Homo sapiens
tttctgctgttctgactggagttgcc

SEQ ID NO: 124987 - DNA, 26 bp, Homo sapiens
ttctgctgttctgactggagttgcct

SEQ ID NO: 124988 - DNA, 26 bp, Homo sapiens
tctgctgttctgactggagttgcctt

SEQ ID NO: 124989 - DNA, 26 bp, Homo sapiens
ctgctgttctgactggagttgccttc

SEQ ID NO: 124990 - DNA, 26 bp, Homo sapiens
tgctgttctgactggagttgccttct

SEQ ID NO: 124991 - DNA, 26 bp, Homo sapiens
gctgttctgactggagttgccttctc

SEQ ID NO: 124992 - DNA, 26 bp, Homo sapiens
ctgttctgactggagttgccttctcc

SEQ ID NO: 124993 - DNA, 26 bp, Homo sapiens
tgttctgactggagttgccttctcct

SEQ ID NO: 124994 - DNA, 26 bp, Homo sapiens
gttctgactggagttgccttctcctg

SEQ ID NO: 124995 - DNA, 26 bp, Homo sapiens
ttctgactggagttgccttctcctgg

SEQ ID NO: 124996 - DNA, 26 bp, Homo sapiens
tctgactggagttgccttctcctgga

SEQ ID NO: 124997 - DNA, 26 bp, Homo sapiens
ctgactggagttgccttctcctggag

SEQ ID NO: 124998 - DNA, 26 bp, Homo sapiens
tgactggagttgccttctcctggagc

SEQ ID NO: 124999 - DNA, 26 bp, Homo sapiens
gactggagttgccttctcctggagct

SEQ ID NO: 125000 - DNA, 26 bp, Homo sapiens
actggagttgccttctcctggagctg

SEQ ID NO: 125001 - DNA, 26 bp, Homo sapiens
ctggagttgccttctcctggagctgg

SEQ ID NO: 125002 - DNA, 26 bp, Homo sapiens
tggagttgccttctcctggagctggt

SEQ ID NO: 125003 - DNA, 26 bp, Homo sapiens
ggagttgccttctcctggagctggtg

SEQ ID NO: 125004 - DNA, 26 bp, Homo sapiens
gagttgccttctcctggagctggtgg

SEQ ID NO: 125005 - DNA, 26 bp, Homo sapiens
agttgccttctcctggagctggtggt

SEQ ID NO: 125006 - DNA, 26 bp, Homo sapiens
gttgccttctcctggagctggtggtt

SEQ ID NO: 125007 - DNA, 26 bp, Homo sapiens
ttgccttctcctggagctggtggttc

SEQ ID NO: 125008 - DNA, 26 bp, Homo sapiens
tgccttctcctggagctggtggttca

SEQ ID NO: 125009 - DNA, 26 bp, Homo sapiens
gccttctcctggagctggtggttcaa

SEQ ID NO: 125010 - DNA, 26 bp, Homo sapiens
ccttctcctggagctggtggttcaaa

SEQ ID NO: 125011 - DNA, 26 bp, Homo sapiens
cttctcctggagctggtggttcaaag

SEQ ID NO: 125012 - DNA, 26 bp, Homo sapiens
ttctcctggagctggtggttcaaaga

SEQ ID NO: 125013 - DNA, 26 bp, Homo sapiens
tctcctggagctggtggttcaaagat

SEQ ID NO: 125014 - DNA, 26 bp, Homo sapiens
ctcctggagctggtggttcaaagatt

SEQ ID NO: 125015 - DNA, 26 bp, Homo sapiens
tcctggagctggtggttcaaagattt

SEQ ID NO: 125016 - DNA, 26 bp, Homo sapiens
cctggagctggtggttcaaagatttt

SEQ ID NO: 125017 - DNA, 26 bp, Homo sapiens
ctggagctggtggttcaaagattttc

SEQ ID NO: 125018 - DNA, 26 bp, Homo sapiens
tggagctggtggttcaaagattttca

SEQ ID NO: 125019 - DNA, 26 bp, Homo sapiens
ggagctggtggttcaaagattttcag

SEQ ID NO: 125020 - DNA, 26 bp, Homo sapiens
gagctggtggttcaaagattttcagt

SEQ ID NO: 125021 - DNA, 26 bp, Homo sapiens
agctggtggttcaaagattttcagtc

SEQ ID NO: 125022 - DNA, 26 bp, Homo sapiens
gctggtggttcaaagattttcagtcc

SEQ ID NO: 125023 - DNA, 26 bp, Homo sapiens
ctggtggttcaaagattttcagtccc

SEQ ID NO: 125024 - DNA, 26 bp, Homo sapiens
tggtggttcaaagattttcagtcccg

SEQ ID NO: 125025 - DNA, 26 bp, Homo sapiens
ggtggttcaaagattttcagtcccgc

SEQ ID NO: 125026 - DNA, 26 bp, Homo sapiens
gtggttcaaagattttcagtcccgcg

SEQ ID NO: 125027 - DNA, 26 bp, Homo sapiens
tggttcaaagattttcagtcccgcgg

SEQ ID NO: 125028 - DNA, 26 bp, Homo sapiens
ggttcaaagattttcagtcccgcggt

SEQ ID NO: 125029 - DNA, 26 bp, Homo sapiens
gttcaaagattttcagtcccgcggtg

SEQ ID NO: 125030 - DNA, 26 bp, Homo sapiens
ttcaaagattttcagtcccgcggtga

SEQ ID NO: 125031 - DNA, 26 bp, Homo sapiens
tcaaagattttcagtcccgcggtgac

SEQ ID NO: 125032 - DNA, 26 bp, Homo sapiens
caaagattttcagtcccgcggtgaca

SEQ ID NO: 125033 - DNA, 26 bp, Homo sapiens
aaagattttcagtcccgcggtgacag

SEQ ID NO: 125034 - DNA, 26 bp, Homo sapiens
aagattttcagtcccgcggtgacagc

SEQ ID NO: 125035 - DNA, 26 bp, Homo sapiens
agattttcagtcccgcggtgacagct

SEQ ID NO: 125036 - DNA, 26 bp, Homo sapiens
gattttcagtcccgcggtgacagctg

SEQ ID NO: 125037 - DNA, 26 bp, Homo sapiens
attttcagtcccgcggtgacagctgg

SEQ ID NO: 125038 - DNA, 26 bp, Homo sapiens
ttttcagtcccgcggtgacagctgga

SEQ ID NO: 125039 - DNA, 26 bp, Homo sapiens
tttcagtcccgcggtgacagctggag

SEQ ID NO: 125040 - DNA, 26 bp, Homo sapiens
ttcagtcccgcggtgacagctggagc

SEQ ID NO: 125041 - DNA, 26 bp, Homo sapiens
tcagtcccgcggtgacagctggagct

SEQ ID NO: 125042 - DNA, 26 bp, Homo sapiens
cagtcccgcggtgacagctggagctt

SEQ ID NO: 125043 - DNA, 26 bp, Homo sapiens
agtcccgcggtgacagctggagcttc

SEQ ID NO: 125044 - DNA, 26 bp, Homo sapiens
gtcccgcggtgacagctggagcttcc

SEQ ID NO: 125045 - DNA, 26 bp, Homo sapiens
tcccgcggtgacagctggagcttcct

SEQ ID NO: 125046 - DNA, 26 bp, Homo sapiens
cccgcggtgacagctggagcttcctc

SEQ ID NO: 125047 - DNA, 26 bp, Homo sapiens
ccgcggtgacagctggagcttcctcc

SEQ ID NO: 125048 - DNA, 26 bp, Homo sapiens
cgcggtgacagctggagcttcctcca

SEQ ID NO: 125049 - DNA, 26 bp, Homo sapiens
gcggtgacagctggagcttcctccag

SEQ ID NO: 125050 - DNA, 26 bp, Homo sapiens
cggtgacagctggagcttcctccagg

SEQ ID NO: 125051 - DNA, 26 bp, Homo sapiens
ggtgacagctggagcttcctccaggc

SEQ ID NO: 125052 - DNA, 26 bp, Homo sapiens
gtgacagctggagcttcctccaggcc

SEQ ID NO: 125053 - DNA, 26 bp, Homo sapiens
tgacagctggagcttcctccaggccg

SEQ ID NO: 125054 - DNA, 26 bp, Homo sapiens
gacagctggagcttcctccaggccgg

SEQ ID NO: 125055 - DNA, 26 bp, Homo sapiens
acagctggagcttcctccaggccggc

SEQ ID NO: 125056 - DNA, 26 bp, Homo sapiens
cagctggagcttcctccaggccggcc

SEQ ID NO: 125057 - DNA, 26 bp, Homo sapiens
agctggagcttcctccaggccggcct

SEQ ID NO: 125058 - DNA, 26 bp, Homo sapiens
gctggagcttcctccaggccggcctt

SEQ ID NO: 125059 - DNA, 26 bp, Homo sapiens
ctggagcttcctccaggccggccttg

SEQ ID NO: 125060 - DNA, 26 bp, Homo sapiens
tggagcttcctccaggccggccttgg

SEQ ID NO: 125061 - DNA, 26 bp, Homo sapiens
ggagcttcctccaggccggccttggg

SEQ ID NO: 125062 - DNA, 26 bp, Homo sapiens
gagcttcctccaggccggccttgggg

SEQ ID NO: 125063 - DNA, 26 bp, Homo sapiens
agcttcctccaggccggccttggggg

SEQ ID NO: 125064 - DNA, 26 bp, Homo sapiens
gcttcctccaggccggccttgggggc

SEQ ID NO: 125065 - DNA, 26 bp, Homo sapiens
cttcctccaggccggccttgggggct

SEQ ID NO: 125066 - DNA, 26 bp, Homo sapiens
ttcctccaggccggccttgggggctc

SEQ ID NO: 125067 - DNA, 26 bp, Homo sapiens
tcctccaggccggccttgggggctcc

SEQ ID NO: 125068 - DNA, 26 bp, Homo sapiens
cctccaggccggccttgggggctcct

SEQ ID NO: 125069 - DNA, 26 bp, Homo sapiens
ctccaggccggccttgggggctcctg

SEQ ID NO: 125070 - DNA, 26 bp, Homo sapiens
tccaggccggccttgggggctcctgc

SEQ ID NO: 125071 - DNA, 26 bp, Homo sapiens
ccaggccggccttgggggctcctgct

SEQ ID NO: 125072 - DNA, 26 bp, Homo sapiens
caggccggccttgggggctcctgctc

SEQ ID NO: 125073 - DNA, 26 bp, Homo sapiens
aggccggccttgggggctcctgctcc

SEQ ID NO: 125074 - DNA, 26 bp, Homo sapiens
ggccggccttgggggctcctgctcct

SEQ ID NO: 125075 - DNA, 26 bp, Homo sapiens
gccggccttgggggctcctgctcctg

SEQ ID NO: 125076 - DNA, 26 bp, Homo sapiens
ccggccttgggggctcctgctcctgc

SEQ ID NO: 125077 - DNA, 26 bp, Homo sapiens
cggccttgggggctcctgctcctgct

SEQ ID NO: 125078 - DNA, 26 bp, Homo sapiens
ggccttgggggctcctgctcctgctg

SEQ ID NO: 125079 - DNA, 26 bp, Homo sapiens
gccttgggggctcctgctcctgctgg

SEQ ID NO: 125080 - DNA, 26 bp, Homo sapiens
ccttgggggctcctgctcctgctggc

SEQ ID NO: 125081 - DNA, 26 bp, Homo sapiens
cttgggggctcctgctcctgctggca

SEQ ID NO: 125082 - DNA, 26 bp, Homo sapiens
ttgggggctcctgctcctgctggcag

SEQ ID NO: 125083 - DNA, 26 bp, Homo sapiens
tgggggctcctgctcctgctggcagc

SEQ ID NO: 125084 - DNA, 26 bp, Homo sapiens
gggggctcctgctcctgctggcagct

SEQ ID NO: 125085 - DNA, 26 bp, Homo sapiens
ggggctcctgctcctgctggcagctt

SEQ ID NO: 125086 - DNA, 26 bp, Homo sapiens
gggctcctgctcctgctggcagcttc

SEQ ID NO: 125087 - DNA, 26 bp, Homo sapiens
ggctcctgctcctgctggcagcttct

SEQ ID NO: 125088 - DNA, 26 bp, Homo sapiens
gctcctgctcctgctggcagcttctc

SEQ ID NO: 125089 - DNA, 26 bp, Homo sapiens
ctcctgctcctgctggcagcttctcc

SEQ ID NO: 125090 - DNA, 26 bp, Homo sapiens
tcctgctcctgctggcagcttctccg

SEQ ID NO: 125091 - DNA, 26 bp, Homo sapiens
cctgctcctgctggcagcttctccgc

SEQ ID NO: 125092 - DNA, 26 bp, Homo sapiens
ctgctcctgctggcagcttctccgcg

SEQ ID NO: 125093 - DNA, 26 bp, Homo sapiens
tgctcctgctggcagcttctccgcgt

SEQ ID NO: 125094 - DNA, 26 bp, Homo sapiens
gctcctgctggcagcttctccgcgtg

SEQ ID NO: 125095 - DNA, 26 bp, Homo sapiens
ctcctgctggcagcttctccgcgtgg

SEQ ID NO: 125096 - DNA, 26 bp, Homo sapiens
tcctgctggcagcttctccgcgtggt

SEQ ID NO: 125097 - DNA, 26 bp, Homo sapiens
cctgctggcagcttctccgcgtggtg

SEQ ID NO: 125098 - DNA, 26 bp, Homo sapiens
ctgctggcagcttctccgcgtggtgg

SEQ ID NO: 125099 - DNA, 26 bp, Homo sapiens
tgctggcagcttctccgcgtggtggc

SEQ ID NO: 125100 - DNA, 26 bp, Homo sapiens
gctggcagcttctccgcgtggtggcc

SEQ ID NO: 125101 - DNA, 26 bp, Homo sapiens
ctggcagcttctccgcgtggtggccc

SEQ ID NO: 125102 - DNA, 26 bp, Homo sapiens
tggcagcttctccgcgtggtggccct

SEQ ID NO: 125103 - DNA, 26 bp, Homo sapiens
ggcagcttctccgcgtggtggccctg

SEQ ID NO: 125104 - DNA, 26 bp, Homo sapiens
gcagcttctccgcgtggtggccctgc

SEQ ID NO: 125105 - DNA, 26 bp, Homo sapiens
cagcttctccgcgtggtggccctgca

SEQ ID NO: 125106 - DNA, 26 bp, Homo sapiens
agcttctccgcgtggtggccctgcag

SEQ ID NO: 125107 - DNA, 26 bp, Homo sapiens
gcttctccgcgtggtggccctgcagc

SEQ ID NO: 125108 - DNA, 26 bp, Homo sapiens
cttctccgcgtggtggccctgcagct

SEQ ID NO: 125109 - DNA, 26 bp, Homo sapiens
ttctccgcgtggtggccctgcagctc

SEQ ID NO: 125110 - DNA, 26 bp, Homo sapiens
tctccgcgtggtggccctgcagctct

SEQ ID NO: 125111 - DNA, 26 bp, Homo sapiens
ctccgcgtggtggccctgcagctctg

SEQ ID NO: 125112 - DNA, 26 bp, Homo sapiens
tccgcgtggtggccctgcagctctgc

SEQ ID NO: 125113 - DNA, 26 bp, Homo sapiens
ccgcgtggtggccctgcagctctgcc

SEQ ID NO: 125114 - DNA, 26 bp, Homo sapiens
cgcgtggtggccctgcagctctgccc

SEQ ID NO: 125115 - DNA, 26 bp, Homo sapiens
gcgtggtggccctgcagctctgcccg

SEQ ID NO: 125116 - DNA, 26 bp, Homo sapiens
cgtggtggccctgcagctctgcccgg

SEQ ID NO: 125117 - DNA, 26 bp, Homo sapiens
gtggtggccctgcagctctgcccgga

SEQ ID NO: 125118 - DNA, 26 bp, Homo sapiens
tggtggccctgcagctctgcccggag

SEQ ID NO: 125119 - DNA, 26 bp, Homo sapiens
ggtggccctgcagctctgcccggagg

SEQ ID NO: 125120 - DNA, 26 bp, Homo sapiens
gtggccctgcagctctgcccggaggc

SEQ ID NO: 125121 - DNA, 26 bp, Homo sapiens
tggccctgcagctctgcccggaggct

SEQ ID NO: 125122 - DNA, 26 bp, Homo sapiens
ggccctgcagctctgcccggaggctg

SEQ ID NO: 125123 - DNA, 26 bp, Homo sapiens
gccctgcagctctgcccggaggctgg

SEQ ID NO: 125124 - DNA, 26 bp, Homo sapiens
ccctgcagctctgcccggaggctggc

SEQ ID NO: 125125 - DNA, 26 bp, Homo sapiens
cctgcagctctgcccggaggctggcc

SEQ ID NO: 125126 - DNA, 26 bp, Homo sapiens
ctgcagctctgcccggaggctggcca

SEQ ID NO: 125127 - DNA, 26 bp, Homo sapiens
tgcagctctgcccggaggctggccag

SEQ ID NO: 125128 - DNA, 26 bp, Homo sapiens
gcagctctgcccggaggctggccagg

SEQ ID NO: 125129 - DNA, 26 bp, Homo sapiens
cagctctgcccggaggctggccaggt

SEQ ID NO: 125130 - DNA, 26 bp, Homo sapiens
agctctgcccggaggctggccaggtc

SEQ ID NO: 125131 - DNA, 26 bp, Homo sapiens
gctctgcccggaggctggccaggtcc

SEQ ID NO: 125132 - DNA, 26 bp, Homo sapiens
ctctgcccggaggctggccaggtccc

SEQ ID NO: 125133 - DNA, 26 bp, Homo sapiens
tctgcccggaggctggccaggtcccc

SEQ ID NO: 125134 - DNA, 26 bp, Homo sapiens
ctgcccggaggctggccaggtcccct

SEQ ID NO: 125135 - DNA, 26 bp, Homo sapiens
tgcccggaggctggccaggtcccctt

SEQ ID NO: 125136 - DNA, 26 bp, Homo sapiens
gcccggaggctggccaggtccccttg

SEQ ID NO: 125137 - DNA, 26 bp, Homo sapiens
cccggaggctggccaggtccccttgc

SEQ ID NO: 125138 - DNA, 26 bp, Homo sapiens
ccggaggctggccaggtccccttgca

SEQ ID NO: 125139 - DNA, 26 bp, Homo sapiens
cggaggctggccaggtccccttgcag

SEQ ID NO: 125140 - DNA, 26 bp, Homo sapiens
ggaggctggccaggtccccttgcagg

SEQ ID NO: 125141 - DNA, 26 bp, Homo sapiens
gaggctggccaggtccccttgcaggg

SEQ ID NO: 125142 - DNA, 26 bp, Homo sapiens
aggctggccaggtccccttgcagggc

SEQ ID NO: 125143 - DNA, 26 bp, Homo sapiens
ggctggccaggtccccttgcagggcg

SEQ ID NO: 125144 - DNA, 26 bp, Homo sapiens
gctggccaggtccccttgcagggcgg

SEQ ID NO: 125145 - DNA, 26 bp, Homo sapiens
ctggccaggtccccttgcagggcggc

SEQ ID NO: 125146 - DNA, 26 bp, Homo sapiens
tggccaggtccccttgcagggcggcc

SEQ ID NO: 125147 - DNA, 26 bp, Homo sapiens
ggccaggtccccttgcagggcggcca

SEQ ID NO: 125148 - DNA, 26 bp, Homo sapiens
gccaggtccccttgcagggcggccac

SEQ ID NO: 125149 - DNA, 26 bp, Homo sapiens
ccaggtccccttgcagggcggccacc

SEQ ID NO: 125150 - DNA, 26 bp, Homo sapiens
caggtccccttgcagggcggccacct

SEQ ID NO: 125151 - DNA, 26 bp, Homo sapiens
aggtccccttgcagggcggccacctg

SEQ ID NO: 125152 - DNA, 26 bp, Homo sapiens
ggtccccttgcagggcggccacctgg

SEQ ID NO: 125153 - DNA, 26 bp, Homo sapiens
gtccccttgcagggcggccacctggt

SEQ ID NO: 125154 - DNA, 26 bp, Homo sapiens
tccccttgcagggcggccacctggta

SEQ ID NO: 125155 - DNA, 26 bp, Homo sapiens
ccccttgcagggcggccacctggtag

SEQ ID NO: 125156 - DNA, 26 bp, Homo sapiens
cccttgcagggcggccacctggtaga

SEQ ID NO: 125157 - DNA, 26 bp, Homo sapiens
ccttgcagggcggccacctggtagaa

SEQ ID NO: 125158 - DNA, 26 bp, Homo sapiens
cttgcagggcggccacctggtagaaa

SEQ ID NO: 125159 - DNA, 26 bp, Homo sapiens
ttgcagggcggccacctggtagaaag

SEQ ID NO: 125160 - DNA, 26 bp, Homo sapiens
tgcagggcggccacctggtagaaaga

SEQ ID NO: 125161 - DNA, 26 bp, Homo sapiens
gcagggcggccacctggtagaaagac

SEQ ID NO: 125162 - DNA, 26 bp, Homo sapiens
cagggcggccacctggtagaaagaca

SEQ ID NO: 125163 - DNA, 26 bp, Homo sapiens
agggcggccacctggtagaaagacac

SEQ ID NO: 125164 - DNA, 26 bp, Homo sapiens
gggcggccacctggtagaaagacacc

SEQ ID NO: 125165 - DNA, 26 bp, Homo sapiens
ggcggccacctggtagaaagacacca

SEQ ID NO: 125166 - DNA, 26 bp, Homo sapiens
gcggccacctggtagaaagacaccac

SEQ ID NO: 125167 - DNA, 26 bp, Homo sapiens
cggccacctggtagaaagacaccacc

SEQ ID NO: 125168 - DNA, 26 bp, Homo sapiens
ggccacctggtagaaagacaccaccg

SEQ ID NO: 125169 - DNA, 26 bp, Homo sapiens
gccacctggtagaaagacaccaccgt

SEQ ID NO: 125170 - DNA, 26 bp, Homo sapiens
ccacctggtagaaagacaccaccgtg

SEQ ID NO: 125171 - DNA, 26 bp, Homo sapiens
cacctggtagaaagacaccaccgtga

SEQ ID NO: 125172 - DNA, 26 bp, Homo sapiens
acctggtagaaagacaccaccgtgag

SEQ ID NO: 125173 - DNA, 26 bp, Homo sapiens
cctggtagaaagacaccaccgtgagg

SEQ ID NO: 125174 - DNA, 26 bp, Homo sapiens
ctggtagaaagacaccaccgtgaggc

SEQ ID NO: 125175 - DNA, 26 bp, Homo sapiens
tggtagaaagacaccaccgtgaggca

SEQ ID NO: 125176 - DNA, 26 bp, Homo sapiens
ggtagaaagacaccaccgtgaggcag

SEQ ID NO: 125177 - DNA, 26 bp, Homo sapiens
gtagaaagacaccaccgtgaggcagc

SEQ ID NO: 125178 - DNA, 26 bp, Homo sapiens
tagaaagacaccaccgtgaggcagca

SEQ ID NO: 125179 - DNA, 26 bp, Homo sapiens
agaaagacaccaccgtgaggcagcaa

SEQ ID NO: 125180 - DNA, 26 bp, Homo sapiens
gaaagacaccaccgtgaggcagcaag

SEQ ID NO: 125181 - DNA, 26 bp, Homo sapiens
aaagacaccaccgtgaggcagcaaga

SEQ ID NO: 125182 - DNA, 26 bp, Homo sapiens
aagacaccaccgtgaggcagcaagac

SEQ ID NO: 125183 - DNA, 26 bp, Homo sapiens
agacaccaccgtgaggcagcaagaca

SEQ ID NO: 125184 - DNA, 26 bp, Homo sapiens
gacaccaccgtgaggcagcaagacag

SEQ ID NO: 125185 - DNA, 26 bp, Homo sapiens
acaccaccgtgaggcagcaagacagc

SEQ ID NO: 125186 - DNA, 26 bp, Homo sapiens
caccaccgtgaggcagcaagacagca

SEQ ID NO: 125187 - DNA, 26 bp, Homo sapiens
accaccgtgaggcagcaagacagcag

SEQ ID NO: 125188 - DNA, 26 bp, Homo sapiens
ccaccgtgaggcagcaagacagcagt

SEQ ID NO: 125189 - DNA, 26 bp, Homo sapiens
caccgtgaggcagcaagacagcagtg

SEQ ID NO: 125190 - DNA, 26 bp, Homo sapiens
accgtgaggcagcaagacagcagtgc

SEQ ID NO: 125191 - DNA, 26 bp, Homo sapiens
ccgtgaggcagcaagacagcagtgcc

SEQ ID NO: 125192 - DNA, 26 bp, Homo sapiens
cgtgaggcagcaagacagcagtgcca

SEQ ID NO: 125193 - DNA, 26 bp, Homo sapiens
gtgaggcagcaagacagcagtgccag

SEQ ID NO: 125194 - DNA, 26 bp, Homo sapiens
tgaggcagcaagacagcagtgccagc

SEQ ID NO: 125195 - DNA, 26 bp, Homo sapiens
gaggcagcaagacagcagtgccagca

SEQ ID NO: 125196 - DNA, 26 bp, Homo sapiens
aggcagcaagacagcagtgccagcag

SEQ ID NO: 125197 - DNA, 26 bp, Homo sapiens
ggcagcaagacagcagtgccagcagc

SEQ ID NO: 125198 - DNA, 26 bp, Homo sapiens
gcagcaagacagcagtgccagcagca

SEQ ID NO: 125199 - DNA, 26 bp, Homo sapiens
cagcaagacagcagtgccagcagcaa

SEQ ID NO: 125200 - DNA, 26 bp, Homo sapiens
agcaagacagcagtgccagcagcaag

SEQ ID NO: 125201 - DNA, 26 bp, Homo sapiens
gcaagacagcagtgccagcagcaagg

SEQ ID NO: 125202 - DNA, 26 bp, Homo sapiens
caagacagcagtgccagcagcaaggt

SEQ ID NO: 125203 - DNA, 26 bp, Homo sapiens
aagacagcagtgccagcagcaaggtt

SEQ ID NO: 125204 - DNA, 26 bp, Homo sapiens
agacagcagtgccagcagcaaggttg

SEQ ID NO: 125205 - DNA, 26 bp, Homo sapiens
gacagcagtgccagcagcaaggttgc

SEQ ID NO: 125206 - DNA, 26 bp, Homo sapiens
acagcagtgccagcagcaaggttgca

SEQ ID NO: 125207 - DNA, 26 bp, Homo sapiens
cagcagtgccagcagcaaggttgcag

SEQ ID NO: 125208 - DNA, 26 bp, Homo sapiens
agcagtgccagcagcaaggttgcagc

SEQ ID NO: 125209 - DNA, 26 bp, Homo sapiens
gcagtgccagcagcaaggttgcagcc

SEQ ID NO: 125210 - DNA, 26 bp, Homo sapiens
cagtgccagcagcaaggttgcagcca

SEQ ID NO: 125211 - DNA, 26 bp, Homo sapiens
agtgccagcagcaaggttgcagccag

SEQ ID NO: 125212 - DNA, 26 bp, Homo sapiens
gtgccagcagcaaggttgcagccagc

SEQ ID NO: 125213 - DNA, 26 bp, Homo sapiens
tgccagcagcaaggttgcagccagca

SEQ ID NO: 125214 - DNA, 26 bp, Homo sapiens
gccagcagcaaggttgcagccagcag

SEQ ID NO: 125215 - DNA, 26 bp, Homo sapiens
ccagcagcaaggttgcagccagcagc

SEQ ID NO: 125216 - DNA, 26 bp, Homo sapiens
cagcagcaaggttgcagccagcagct

SEQ ID NO: 125217 - DNA, 26 bp, Homo sapiens
agcagcaaggttgcagccagcagctt

SEQ ID NO: 125218 - DNA, 26 bp, Homo sapiens
gcagcaaggttgcagccagcagcttt

SEQ ID NO: 125219 - DNA, 26 bp, Homo sapiens
cagcaaggttgcagccagcagctttc

SEQ ID NO: 125220 - DNA, 26 bp, Homo sapiens
agcaaggttgcagccagcagctttcc

SEQ ID NO: 125221 - DNA, 26 bp, Homo sapiens
gcaaggttgcagccagcagctttccg

SEQ ID NO: 125222 - DNA, 26 bp, Homo sapiens
caaggttgcagccagcagctttccgt

SEQ ID NO: 125223 - DNA, 26 bp, Homo sapiens
aaggttgcagccagcagctttccgtc

SEQ ID NO: 125224 - DNA, 26 bp, Homo sapiens
aggttgcagccagcagctttccgtct

SEQ ID NO: 125225 - DNA, 26 bp, Homo sapiens
ggttgcagccagcagctttccgtctt

SEQ ID NO: 125226 - DNA, 26 bp, Homo sapiens
gttgcagccagcagctttccgtcttt

SEQ ID NO: 125227 - DNA, 26 bp, Homo sapiens
ttgcagccagcagctttccgtctttg

SEQ ID NO: 125228 - DNA, 26 bp, Homo sapiens
tgcagccagcagctttccgtctttgg

SEQ ID NO: 125229 - DNA, 26 bp, Homo sapiens
gcagccagcagctttccgtctttgga

SEQ ID NO: 125230 - DNA, 26 bp, Homo sapiens
cagccagcagctttccgtctttggag

SEQ ID NO: 125231 - DNA, 26 bp, Homo sapiens
agccagcagctttccgtctttggagg

SEQ ID NO: 125232 - DNA, 26 bp, Homo sapiens
gccagcagctttccgtctttggagga

SEQ ID NO: 125233 - DNA, 26 bp, Homo sapiens
ccagcagctttccgtctttggaggat

SEQ ID NO: 125234 - DNA, 26 bp, Homo sapiens
cagcagctttccgtctttggaggatc

SEQ ID NO: 125235 - DNA, 26 bp, Homo sapiens
agcagctttccgtctttggaggatcg

SEQ ID NO: 125236 - DNA, 26 bp, Homo sapiens
gcagctttccgtctttggaggatcgg

SEQ ID NO: 125237 - DNA, 26 bp, Homo sapiens
cagctttccgtctttggaggatcgga

SEQ ID NO: 125238 - DNA, 26 bp, Homo sapiens
agctttccgtctttggaggatcggac

SEQ ID NO: 125239 - DNA, 26 bp, Homo sapiens
gctttccgtctttggaggatcggaca

SEQ ID NO: 125240 - DNA, 26 bp, Homo sapiens
ctttccgtctttggaggatcggacag

SEQ ID NO: 125241 - DNA, 26 bp, Homo sapiens
tttccgtctttggaggatcggacaga

SEQ ID NO: 125242 - DNA, 26 bp, Homo sapiens
ttccgtctttggaggatcggacagag

SEQ ID NO: 125243 - DNA, 26 bp, Homo sapiens
tccgtctttggaggatcggacagagg

SEQ ID NO: 125244 - DNA, 26 bp, Homo sapiens
ccgtctttggaggatcggacagaggg

SEQ ID NO: 125245 - DNA, 26 bp, Homo sapiens
cgtctttggaggatcggacagagggg

SEQ ID NO: 125246 - DNA, 26 bp, Homo sapiens
gtctttggaggatcggacagaggggc

SEQ ID NO: 125247 - DNA, 26 bp, Homo sapiens
tctttggaggatcggacagaggggct

SEQ ID NO: 125248 - DNA, 26 bp, Homo sapiens
ctttggaggatcggacagaggggctt

SEQ ID NO: 125249 - DNA, 26 bp, Homo sapiens
tttggaggatcggacagaggggcttt

SEQ ID NO: 125250 - DNA, 26 bp, Homo sapiens
ttggaggatcggacagaggggctttc

SEQ ID NO: 125251 - DNA, 26 bp, Homo sapiens
tggaggatcggacagaggggctttcc

SEQ ID NO: 125252 - DNA, 26 bp, Homo sapiens
ggaggatcggacagaggggctttcct

SEQ ID NO: 125253 - DNA, 26 bp, Homo sapiens
gaggatcggacagaggggctttcctt

SEQ ID NO: 125254 - DNA, 26 bp, Homo sapiens
aggatcggacagaggggctttccttc

SEQ ID NO: 125255 - DNA, 26 bp, Homo sapiens
ggatcggacagaggggctttccttcc

SEQ ID NO: 125256 - DNA, 26 bp, Homo sapiens
gatcggacagaggggctttccttccg

SEQ ID NO: 125257 - DNA, 26 bp, Homo sapiens
atcggacagaggggctttccttccgt

SEQ ID NO: 125258 - DNA, 26 bp, Homo sapiens
tcggacagaggggctttccttccgtg

SEQ ID NO: 125259 - DNA, 26 bp, Homo sapiens
cggacagaggggctttccttccgtgg

SEQ ID NO: 125260 - DNA, 26 bp, Homo sapiens
ggacagaggggctttccttccgtggg

SEQ ID NO: 125261 - DNA, 26 bp, Homo sapiens
gacagaggggctttccttccgtggga

SEQ ID NO: 125262 - DNA, 26 bp, Homo sapiens
acagaggggctttccttccgtgggag

SEQ ID NO: 125263 - DNA, 26 bp, Homo sapiens
cagaggggctttccttccgtgggagg

SEQ ID NO: 125264 - DNA, 26 bp, Homo sapiens
agaggggctttccttccgtgggagga

SEQ ID NO: 125265 - DNA, 26 bp, Homo sapiens
gaggggctttccttccgtgggaggat

SEQ ID NO: 125266 - DNA, 26 bp, Homo sapiens
aggggctttccttccgtgggaggatg

SEQ ID NO: 125267 - DNA, 26 bp, Homo sapiens
ggggctttccttccgtgggaggatgg

SEQ ID NO: 125268 - DNA, 26 bp, Homo sapiens
gggctttccttccgtgggaggatgga

SEQ ID NO: 125269 - DNA, 26 bp, Homo sapiens
ggctttccttccgtgggaggatggaa

SEQ ID NO: 125270 - DNA, 26 bp, Homo sapiens
gctttccttccgtgggaggatggaaa

SEQ ID NO: 125271 - DNA, 26 bp, Homo sapiens
ctttccttccgtgggaggatggaaac

SEQ ID NO: 125272 - DNA, 26 bp, Homo sapiens
tttccttccgtgggaggatggaaaca

SEQ ID NO: 125273 - DNA, 26 bp, Homo sapiens
ttccttccgtgggaggatggaaacac

SEQ ID NO: 125274 - DNA, 26 bp, Homo sapiens
tccttccgtgggaggatggaaacaca

SEQ ID NO: 125275 - DNA, 26 bp, Homo sapiens
ccttccgtgggaggatggaaacacac

SEQ ID NO: 125276 - DNA, 26 bp, Homo sapiens
cttccgtgggaggatggaaacacact

SEQ ID NO: 125277 - DNA, 26 bp, Homo sapiens
ttccgtgggaggatggaaacacactc

SEQ ID NO: 125278 - DNA, 26 bp, Homo sapiens
tccgtgggaggatggaaacacactcc

SEQ ID NO: 125279 - DNA, 26 bp, Homo sapiens
ccgtgggaggatggaaacacactcct

SEQ ID NO: 125280 - DNA, 26 bp, Homo sapiens
cgtgggaggatggaaacacactcctt

SEQ ID NO: 125281 - DNA, 26 bp, Homo sapiens
gtgggaggatggaaacacactccttc

SEQ ID NO: 125282 - DNA, 26 bp, Homo sapiens
tgggaggatggaaacacactccttca

SEQ ID NO: 125283 - DNA, 26 bp, Homo sapiens
gggaggatggaaacacactccttcag

SEQ ID NO: 125284 - DNA, 26 bp, Homo sapiens
ggaggatggaaacacactccttcagt

SEQ ID NO: 125285 - DNA, 26 bp, Homo sapiens
gaggatggaaacacactccttcagtt

SEQ ID NO: 125286 - DNA, 26 bp, Homo sapiens
aggatggaaacacactccttcagttt

SEQ ID NO: 125287 - DNA, 26 bp, Homo sapiens
ggatggaaacacactccttcagtttc

SEQ ID NO: 125288 - DNA, 26 bp, Homo sapiens
gatggaaacacactccttcagtttca

SEQ ID NO: 125289 - DNA, 26 bp, Homo sapiens
atggaaacacactccttcagtttcat

SEQ ID NO: 125290 - DNA, 26 bp, Homo sapiens
tggaaacacactccttcagtttcatt

SEQ ID NO: 125291 - DNA, 26 bp, Homo sapiens
ggaaacacactccttcagtttcattt

SEQ ID NO: 125292 - DNA, 26 bp, Homo sapiens
gaaacacactccttcagtttcatttc

SEQ ID NO: 125293 - DNA, 26 bp, Homo sapiens
aaacacactccttcagtttcatttct

SEQ ID NO: 125294 - DNA, 26 bp, Homo sapiens
aacacactccttcagtttcatttctt

SEQ ID NO: 125295 - DNA, 26 bp, Homo sapiens
acacactccttcagtttcatttcttc

SEQ ID NO: 125296 - DNA, 26 bp, Homo sapiens
cacactccttcagtttcatttcttct

SEQ ID NO: 125297 - DNA, 26 bp, Homo sapiens
acactccttcagtttcatttcttctc

SEQ ID NO: 125298 - DNA, 26 bp, Homo sapiens
cactccttcagtttcatttcttctct

SEQ ID NO: 125299 - DNA, 26 bp, Homo sapiens
actccttcagtttcatttcttctctt

SEQ ID NO: 125300 - DNA, 26 bp, Homo sapiens
ctccttcagtttcatttcttctcttt

SEQ ID NO: 125301 - DNA, 26 bp, Homo sapiens
tccttcagtttcatttcttctctttt

SEQ ID NO: 125302 - DNA, 26 bp, Homo sapiens
ccttcagtttcatttcttctcttttc

SEQ ID NO: 125303 - DNA, 26 bp, Homo sapiens
cttcagtttcatttcttctcttttct

SEQ ID NO: 125304 - DNA, 26 bp, Homo sapiens
ttcagtttcatttcttctcttttctt

SEQ ID NO: 125305 - DNA, 26 bp, Homo sapiens
tcagtttcatttcttctcttttctta

SEQ ID NO: 125306 - DNA, 26 bp, Homo sapiens
cagtttcatttcttctcttttcttaa

SEQ ID NO: 125307 - DNA, 26 bp, Homo sapiens
agtttcatttcttctcttttcttaag

SEQ ID NO: 125308 - DNA, 26 bp, Homo sapiens
gtttcatttcttctcttttcttaagg

SEQ ID NO: 125309 - DNA, 26 bp, Homo sapiens
tttcatttcttctcttttcttaaggc

SEQ ID NO: 125310 - DNA, 26 bp, Homo sapiens
ttcatttcttctcttttcttaaggca

SEQ ID NO: 125311 - DNA, 26 bp, Homo sapiens
tcatttcttctcttttcttaaggcaa

SEQ ID NO: 125312 - DNA, 26 bp, Homo sapiens
catttcttctcttttcttaaggcaag

SEQ ID NO: 125313 - DNA, 26 bp, Homo sapiens
atttcttctcttttcttaaggcaaga

SEQ ID NO: 125314 - DNA, 26 bp, Homo sapiens
tttcttctcttttcttaaggcaagaa

SEQ ID NO: 125315 - DNA, 26 bp, Homo sapiens
ttcttctcttttcttaaggcaagaag

SEQ ID NO: 125316 - DNA, 26 bp, Homo sapiens
tcttctcttttcttaaggcaagaagt

SEQ ID NO: 125317 - DNA, 26 bp, Homo sapiens
cttctcttttcttaaggcaagaagta

SEQ ID NO: 125318 - DNA, 26 bp, Homo sapiens
ttctcttttcttaaggcaagaagtaa

SEQ ID NO: 125319 - DNA, 26 bp, Homo sapiens
tctcttttcttaaggcaagaagtaag

SEQ ID NO: 125320 - DNA, 26 bp, Homo sapiens
ctcttttcttaaggcaagaagtaagg

SEQ ID NO: 125321 - DNA, 26 bp, Homo sapiens
tcttttcttaaggcaagaagtaaggc

SEQ ID NO: 125322 - DNA, 26 bp, Homo sapiens
cttttcttaaggcaagaagtaaggcg

SEQ ID NO: 125323 - DNA, 26 bp, Homo sapiens
ttttcttaaggcaagaagtaaggcgt

SEQ ID NO: 125324 - DNA, 26 bp, Homo sapiens
tttcttaaggcaagaagtaaggcgtg

SEQ ID NO: 125325 - DNA, 26 bp, Homo sapiens
ttcttaaggcaagaagtaaggcgtga

SEQ ID NO: 125326 - DNA, 26 bp, Homo sapiens
tcttaaggcaagaagtaaggcgtgac

SEQ ID NO: 125327 - DNA, 26 bp, Homo sapiens
cttaaggcaagaagtaaggcgtgact

SEQ ID NO: 125328 - DNA, 26 bp, Homo sapiens
ttaaggcaagaagtaaggcgtgactg

SEQ ID NO: 125329 - DNA, 26 bp, Homo sapiens
taaggcaagaagtaaggcgtgactgc

SEQ ID NO: 125330 - DNA, 26 bp, Homo sapiens
aaggcaagaagtaaggcgtgactgct

SEQ ID NO: 125331 - DNA, 26 bp, Homo sapiens
aggcaagaagtaaggcgtgactgctc

SEQ ID NO: 125332 - DNA, 26 bp, Homo sapiens
ggcaagaagtaaggcgtgactgctcc

SEQ ID NO: 125333 - DNA, 26 bp, Homo sapiens
gcaagaagtaaggcgtgactgctccc

SEQ ID NO: 125334 - DNA, 26 bp, Homo sapiens
caagaagtaaggcgtgactgctccct

SEQ ID NO: 125335 - DNA, 26 bp, Homo sapiens
aagaagtaaggcgtgactgctccctt

SEQ ID NO: 125336 - DNA, 26 bp, Homo sapiens
agaagtaaggcgtgactgctcccttt

SEQ ID NO: 125337 - DNA, 26 bp, Homo sapiens
gaagtaaggcgtgactgctccctttc

SEQ ID NO: 125338 - DNA, 26 bp, Homo sapiens
aagtaaggcgtgactgctccctttct

SEQ ID NO: 125339 - DNA, 26 bp, Homo sapiens
agtaaggcgtgactgctccctttctg

SEQ ID NO: 125340 - DNA, 26 bp, Homo sapiens
gtaaggcgtgactgctccctttctgt

SEQ ID NO: 125341 - DNA, 26 bp, Homo sapiens
taaggcgtgactgctccctttctgtg

SEQ ID NO: 125342 - DNA, 26 bp, Homo sapiens
aaggcgtgactgctccctttctgtgg

SEQ ID NO: 125343 - DNA, 26 bp, Homo sapiens
aggcgtgactgctccctttctgtgga

SEQ ID NO: 125344 - DNA, 26 bp, Homo sapiens
ggcgtgactgctccctttctgtggag

SEQ ID NO: 125345 - DNA, 26 bp, Homo sapiens
gcgtgactgctccctttctgtggagt

SEQ ID NO: 125346 - DNA, 26 bp, Homo sapiens
cgtgactgctccctttctgtggagtc

SEQ ID NO: 125347 - DNA, 26 bp, Homo sapiens
gtgactgctccctttctgtggagtca

SEQ ID NO: 125348 - DNA, 26 bp, Homo sapiens
tgactgctccctttctgtggagtcat

SEQ ID NO: 125349 - DNA, 26 bp, Homo sapiens
gactgctccctttctgtggagtcatc

SEQ ID NO: 125350 - DNA, 26 bp, Homo sapiens
actgctccctttctgtggagtcatcc

SEQ ID NO: 125351 - DNA, 26 bp, Homo sapiens
ctgctccctttctgtggagtcatcca

SEQ ID NO: 125352 - DNA, 26 bp, Homo sapiens
tgctccctttctgtggagtcatccat

SEQ ID NO: 125353 - DNA, 26 bp, Homo sapiens
gctccctttctgtggagtcatccata

SEQ ID NO: 125354 - DNA, 26 bp, Homo sapiens
ctccctttctgtggagtcatccatat

SEQ ID NO: 125355 - DNA, 26 bp, Homo sapiens
tccctttctgtggagtcatccatatc

SEQ ID NO: 125356 - DNA, 26 bp, Homo sapiens
ccctttctgtggagtcatccatatca

SEQ ID NO: 125357 - DNA, 26 bp, Homo sapiens
cctttctgtggagtcatccatatcac

SEQ ID NO: 125358 - DNA, 26 bp, Homo sapiens
ctttctgtggagtcatccatatcact

SEQ ID NO: 125359 - DNA, 26 bp, Homo sapiens
tttctgtggagtcatccatatcacta

SEQ ID NO: 125360 - DNA, 26 bp, Homo sapiens
ttctgtggagtcatccatatcactac

SEQ ID NO: 125361 - DNA, 26 bp, Homo sapiens
tctgtggagtcatccatatcactact

SEQ ID NO: 125362 - DNA, 26 bp, Homo sapiens
ctgtggagtcatccatatcactactt

SEQ ID NO: 125363 - DNA, 26 bp, Homo sapiens
tgtggagtcatccatatcactacttg

SEQ ID NO: 125364 - DNA, 26 bp, Homo sapiens
gtggagtcatccatatcactacttga

SEQ ID NO: 125365 - DNA, 26 bp, Homo sapiens
tggagtcatccatatcactacttgaa

SEQ ID NO: 125366 - DNA, 26 bp, Homo sapiens
ggagtcatccatatcactacttgaac

SEQ ID NO: 125367 - DNA, 26 bp, Homo sapiens
gagtcatccatatcactacttgaact

SEQ ID NO: 125368 - DNA, 26 bp, Homo sapiens
agtcatccatatcactacttgaactt

SEQ ID NO: 125369 - DNA, 26 bp, Homo sapiens
gtcatccatatcactacttgaacttt

SEQ ID NO: 125370 - DNA, 26 bp, Homo sapiens
tcatccatatcactacttgaactttg

SEQ ID NO: 125371 - DNA, 26 bp, Homo sapiens
catccatatcactacttgaactttga

SEQ ID NO: 125372 - DNA, 26 bp, Homo sapiens
atccatatcactacttgaactttgaa

SEQ ID NO: 125373 - DNA, 26 bp, Homo sapiens
tccatatcactacttgaactttgaag

SEQ ID NO: 125374 - DNA, 26 bp, Homo sapiens
ccatatcactacttgaactttgaagg

SEQ ID NO: 125375 - DNA, 26 bp, Homo sapiens
catatcactacttgaactttgaaggt

SEQ ID NO: 125376 - DNA, 26 bp, Homo sapiens
atatcactacttgaactttgaaggtt

SEQ ID NO: 125377 - DNA, 26 bp, Homo sapiens
tatcactacttgaactttgaaggttg

SEQ ID NO: 125378 - DNA, 26 bp, Homo sapiens
atcactacttgaactttgaaggttgg

SEQ ID NO: 125379 - DNA, 26 bp, Homo sapiens
tcactacttgaactttgaaggttggg

SEQ ID NO: 125380 - DNA, 26 bp, Homo sapiens
cactacttgaactttgaaggttgggg

SEQ ID NO: 125381 - DNA, 26 bp, Homo sapiens
actacttgaactttgaaggttggggc

SEQ ID NO: 125382 - DNA, 26 bp, Homo sapiens
ctacttgaactttgaaggttggggcc

SEQ ID NO: 125383 - DNA, 26 bp, Homo sapiens
tacttgaactttgaaggttggggcct

SEQ ID NO: 125384 - DNA, 26 bp, Homo sapiens
acttgaactttgaaggttggggcctt

SEQ ID NO: 125385 - DNA, 26 bp, Homo sapiens
cttgaactttgaaggttggggccttt

SEQ ID NO: 125386 - DNA, 26 bp, Homo sapiens
ttgaactttgaaggttggggccttta

SEQ ID NO: 125387 - DNA, 26 bp, Homo sapiens
tgaactttgaaggttggggcctttag

SEQ ID NO: 125388 - DNA, 26 bp, Homo sapiens
gaactttgaaggttggggcctttaga

SEQ ID NO: 125389 - DNA, 26 bp, Homo sapiens
aactttgaaggttggggcctttagaa

SEQ ID NO: 125390 - DNA, 26 bp, Homo sapiens
actttgaaggttggggcctttagaat

SEQ ID NO: 125391 - DNA, 26 bp, Homo sapiens
ctttgaaggttggggcctttagaata

SEQ ID NO: 125392 - DNA, 26 bp, Homo sapiens
tttgaaggttggggcctttagaataa

SEQ ID NO: 125393 - DNA, 26 bp, Homo sapiens
ttgaaggttggggcctttagaataag

SEQ ID NO: 125394 - DNA, 26 bp, Homo sapiens
tgaaggttggggcctttagaataagt

SEQ ID NO: 125395 - DNA, 26 bp, Homo sapiens
gaaggttggggcctttagaataagtg

SEQ ID NO: 125396 - DNA, 26 bp, Homo sapiens
aaggttggggcctttagaataagtga

SEQ ID NO: 125397 - DNA, 26 bp, Homo sapiens
aggttggggcctttagaataagtgac

SEQ ID NO: 125398 - DNA, 26 bp, Homo sapiens
ggttggggcctttagaataagtgacc

SEQ ID NO: 125399 - DNA, 26 bp, Homo sapiens
gttggggcctttagaataagtgacca

SEQ ID NO: 125400 - DNA, 26 bp, Homo sapiens
ttggggcctttagaataagtgaccac

SEQ ID NO: 125401 - DNA, 26 bp, Homo sapiens
tggggcctttagaataagtgaccaca

SEQ ID NO: 125402 - DNA, 26 bp, Homo sapiens
ggggcctttagaataagtgaccacag

SEQ ID NO: 125403 - DNA, 26 bp, Homo sapiens
gggcctttagaataagtgaccacagg

SEQ ID NO: 125404 - DNA, 26 bp, Homo sapiens
ggcctttagaataagtgaccacaggg

SEQ ID NO: 125405 - DNA, 26 bp, Homo sapiens
gcctttagaataagtgaccacaggga

SEQ ID NO: 125406 - DNA, 26 bp, Homo sapiens
cctttagaataagtgaccacagggaa

SEQ ID NO: 125407 - DNA, 26 bp, Homo sapiens
ctttagaataagtgaccacagggaat

SEQ ID NO: 125408 - DNA, 26 bp, Homo sapiens
tttagaataagtgaccacagggaatg

SEQ ID NO: 125409 - DNA, 26 bp, Homo sapiens
ttagaataagtgaccacagggaatgg

SEQ ID NO: 125410 - DNA, 26 bp, Homo sapiens
tagaataagtgaccacagggaatgga

SEQ ID NO: 125411 - DNA, 26 bp, Homo sapiens
agaataagtgaccacagggaatggat

SEQ ID NO: 125412 - DNA, 26 bp, Homo sapiens
gaataagtgaccacagggaatggatc

SEQ ID NO: 125413 - DNA, 26 bp, Homo sapiens
aataagtgaccacagggaatggatca

SEQ ID NO: 125414 - DNA, 26 bp, Homo sapiens
ataagtgaccacagggaatggatcat

SEQ ID NO: 125415 - DNA, 26 bp, Homo sapiens
taagtgaccacagggaatggatcatt

SEQ ID NO: 125416 - DNA, 26 bp, Homo sapiens
aagtgaccacagggaatggatcattt

SEQ ID NO: 125417 - DNA, 26 bp, Homo sapiens
agtgaccacagggaatggatcatttc

SEQ ID NO: 125418 - DNA, 26 bp, Homo sapiens
gtgaccacagggaatggatcatttcc

SEQ ID NO: 125419 - DNA, 26 bp, Homo sapiens
tgaccacagggaatggatcatttcct

SEQ ID NO: 125420 - DNA, 26 bp, Homo sapiens
gaccacagggaatggatcatttcctg

SEQ ID NO: 125421 - DNA, 26 bp, Homo sapiens
accacagggaatggatcatttcctgt

SEQ ID NO: 125422 - DNA, 26 bp, Homo sapiens
ccacagggaatggatcatttcctgtt

SEQ ID NO: 125423 - DNA, 26 bp, Homo sapiens
cacagggaatggatcatttcctgtta

SEQ ID NO: 125424 - DNA, 26 bp, Homo sapiens
acagggaatggatcatttcctgttat

SEQ ID NO: 125425 - DNA, 26 bp, Homo sapiens
cagggaatggatcatttcctgttatc

SEQ ID NO: 125426 - DNA, 26 bp, Homo sapiens
agggaatggatcatttcctgttatct

SEQ ID NO: 125427 - DNA, 26 bp, Homo sapiens
gggaatggatcatttcctgttatctg

SEQ ID NO: 125428 - DNA, 26 bp, Homo sapiens
ggaatggatcatttcctgttatctgt

SEQ ID NO: 125429 - DNA, 26 bp, Homo sapiens
gaatggatcatttcctgttatctgtg

SEQ ID NO: 125430 - DNA, 26 bp, Homo sapiens
aatggatcatttcctgttatctgtgt

SEQ ID NO: 125431 - DNA, 26 bp, Homo sapiens
atggatcatttcctgttatctgtgtt

SEQ ID NO: 125432 - DNA, 26 bp, Homo sapiens
tggatcatttcctgttatctgtgttt

SEQ ID NO: 125433 - DNA, 26 bp, Homo sapiens
ggatcatttcctgttatctgtgtttg

SEQ ID NO: 125434 - DNA, 26 bp, Homo sapiens
gatcatttcctgttatctgtgtttgt

SEQ ID NO: 125435 - DNA, 26 bp, Homo sapiens
atcatttcctgttatctgtgtttgtt

SEQ ID NO: 125436 - DNA, 26 bp, Homo sapiens
tcatttcctgttatctgtgtttgttg

SEQ ID NO: 125437 - DNA, 26 bp, Homo sapiens
catttcctgttatctgtgtttgttga

SEQ ID NO: 125438 - DNA, 26 bp, Homo sapiens
atttcctgttatctgtgtttgttgat

SEQ ID NO: 125439 - DNA, 26 bp, Homo sapiens
tttcctgttatctgtgtttgttgatg

SEQ ID NO: 125440 - DNA, 26 bp, Homo sapiens
ttcctgttatctgtgtttgttgatgt

SEQ ID NO: 125441 - DNA, 26 bp, Homo sapiens
tcctgttatctgtgtttgttgatgtc

SEQ ID NO: 125442 - DNA, 26 bp, Homo sapiens
cctgttatctgtgtttgttgatgtcc

SEQ ID NO: 125443 - DNA, 26 bp, Homo sapiens
ctgttatctgtgtttgttgatgtcct

SEQ ID NO: 125444 - DNA, 26 bp, Homo sapiens
tgttatctgtgtttgttgatgtcctg

SEQ ID NO: 125445 - DNA, 26 bp, Homo sapiens
gttatctgtgtttgttgatgtcctgc

SEQ ID NO: 125446 - DNA, 26 bp, Homo sapiens
ttatctgtgtttgttgatgtcctgcg

SEQ ID NO: 125447 - DNA, 26 bp, Homo sapiens
tatctgtgtttgttgatgtcctgcgt

SEQ ID NO: 125448 - DNA, 26 bp, Homo sapiens
atctgtgtttgttgatgtcctgcgtg

SEQ ID NO: 125449 - DNA, 26 bp, Homo sapiens
tctgtgtttgttgatgtcctgcgtgc

SEQ ID NO: 125450 - DNA, 26 bp, Homo sapiens
ctgtgtttgttgatgtcctgcgtgca

SEQ ID NO: 125451 - DNA, 26 bp, Homo sapiens
tgtgtttgttgatgtcctgcgtgcac

SEQ ID NO: 125452 - DNA, 26 bp, Homo sapiens
gtgtttgttgatgtcctgcgtgcact

SEQ ID NO: 125453 - DNA, 26 bp, Homo sapiens
tgtttgttgatgtcctgcgtgcacta

SEQ ID NO: 125454 - DNA, 26 bp, Homo sapiens
gtttgttgatgtcctgcgtgcactac

SEQ ID NO: 125455 - DNA, 26 bp, Homo sapiens
tttgttgatgtcctgcgtgcactaca

SEQ ID NO: 125456 - DNA, 26 bp, Homo sapiens
ttgttgatgtcctgcgtgcactacat

SEQ ID NO: 125457 - DNA, 26 bp, Homo sapiens
tgttgatgtcctgcgtgcactacatg

SEQ ID NO: 125458 - DNA, 26 bp, Homo sapiens
gttgatgtcctgcgtgcactacatgg

SEQ ID NO: 125459 - DNA, 26 bp, Homo sapiens
ttgatgtcctgcgtgcactacatggc

SEQ ID NO: 125460 - DNA, 26 bp, Homo sapiens
tgatgtcctgcgtgcactacatggca

SEQ ID NO: 125461 - DNA, 26 bp, Homo sapiens
gatgtcctgcgtgcactacatggcag

SEQ ID NO: 125462 - DNA, 26 bp, Homo sapiens
atgtcctgcgtgcactacatggcagg

SEQ ID NO: 125463 - DNA, 26 bp, Homo sapiens
tgtcctgcgtgcactacatggcaggg

SEQ ID NO: 125464 - DNA, 26 bp, Homo sapiens
gtcctgcgtgcactacatggcagggc

SEQ ID NO: 125465 - DNA, 26 bp, Homo sapiens
tcctgcgtgcactacatggcagggct

SEQ ID NO: 125466 - DNA, 26 bp, Homo sapiens
cctgcgtgcactacatggcagggctt

SEQ ID NO: 125467 - DNA, 26 bp, Homo sapiens
ctgcgtgcactacatggcagggcttg

SEQ ID NO: 125468 - DNA, 26 bp, Homo sapiens
tgcgtgcactacatggcagggcttgg

SEQ ID NO: 125469 - DNA, 26 bp, Homo sapiens
gcgtgcactacatggcagggcttggc

SEQ ID NO: 125470 - DNA, 26 bp, Homo sapiens
cgtgcactacatggcagggcttggct

SEQ ID NO: 125471 - DNA, 26 bp, Homo sapiens
gtgcactacatggcagggcttggctc

SEQ ID NO: 125472 - DNA, 26 bp, Homo sapiens
tgcactacatggcagggcttggctca

SEQ ID NO: 125473 - DNA, 26 bp, Homo sapiens
gcactacatggcagggcttggctcac

SEQ ID NO: 125474 - DNA, 26 bp, Homo sapiens
cactacatggcagggcttggctcacc

SEQ ID NO: 125475 - DNA, 26 bp, Homo sapiens
actacatggcagggcttggctcaccc

SEQ ID NO: 125476 - DNA, 26 bp, Homo sapiens
ctacatggcagggcttggctcacccc

SEQ ID NO: 125477 - DNA, 26 bp, Homo sapiens
tacatggcagggcttggctcacccct

SEQ ID NO: 125478 - DNA, 26 bp, Homo sapiens
acatggcagggcttggctcacccctc

SEQ ID NO: 125479 - DNA, 26 bp, Homo sapiens
catggcagggcttggctcacccctca

SEQ ID NO: 125480 - DNA, 26 bp, Homo sapiens
atggcagggcttggctcacccctcag

SEQ ID NO: 125481 - DNA, 26 bp, Homo sapiens
tggcagggcttggctcacccctcagg

SEQ ID NO: 125482 - DNA, 26 bp, Homo sapiens
ggcagggcttggctcacccctcagga

SEQ ID NO: 125483 - DNA, 26 bp, Homo sapiens
gcagggcttggctcacccctcaggag

SEQ ID NO: 125484 - DNA, 26 bp, Homo sapiens
cagggcttggctcacccctcaggaga

SEQ ID NO: 125485 - DNA, 26 bp, Homo sapiens
agggcttggctcacccctcaggagag

SEQ ID NO: 125486 - DNA, 26 bp, Homo sapiens
gggcttggctcacccctcaggagagt

SEQ ID NO: 125487 - DNA, 26 bp, Homo sapiens
ggcttggctcacccctcaggagagtt

SEQ ID NO: 125488 - DNA, 26 bp, Homo sapiens
gcttggctcacccctcaggagagtta

SEQ ID NO: 125489 - DNA, 26 bp, Homo sapiens
cttggctcacccctcaggagagttat

SEQ ID NO: 125490 - DNA, 26 bp, Homo sapiens
ttggctcacccctcaggagagttatc

SEQ ID NO: 125491 - DNA, 26 bp, Homo sapiens
tggctcacccctcaggagagttatcc

SEQ ID NO: 125492 - DNA, 26 bp, Homo sapiens
ggctcacccctcaggagagttatcct

SEQ ID NO: 125493 - DNA, 26 bp, Homo sapiens
gctcacccctcaggagagttatcctg

SEQ ID NO: 125494 - DNA, 26 bp, Homo sapiens
ctcacccctcaggagagttatcctga

SEQ ID NO: 125495 - DNA, 26 bp, Homo sapiens
tcacccctcaggagagttatcctgaa

SEQ ID NO: 125496 - DNA, 26 bp, Homo sapiens
cacccctcaggagagttatcctgaat

SEQ ID NO: 125497 - DNA, 26 bp, Homo sapiens
acccctcaggagagttatcctgaatt

SEQ ID NO: 125498 - DNA, 26 bp, Homo sapiens
cccctcaggagagttatcctgaattt

SEQ ID NO: 125499 - DNA, 26 bp, Homo sapiens
ccctcaggagagttatcctgaatttt

SEQ ID NO: 125500 - DNA, 26 bp, Homo sapiens
cctcaggagagttatcctgaattttc

SEQ ID NO: 125501 - DNA, 26 bp, Homo sapiens
ctcaggagagttatcctgaattttct

SEQ ID NO: 125502 - DNA, 26 bp, Homo sapiens
tcaggagagttatcctgaattttctc

SEQ ID NO: 125503 - DNA, 26 bp, Homo sapiens
caggagagttatcctgaattttctcc

SEQ ID NO: 125504 - DNA, 26 bp, Homo sapiens
aggagagttatcctgaattttctcct

SEQ ID NO: 125505 - DNA, 26 bp, Homo sapiens
ggagagttatcctgaattttctcctt

SEQ ID NO: 125506 - DNA, 26 bp, Homo sapiens
gagagttatcctgaattttctccttt

SEQ ID NO: 125507 - DNA, 26 bp, Homo sapiens
agagttatcctgaattttctcctttc

SEQ ID NO: 125508 - DNA, 26 bp, Homo sapiens
gagttatcctgaattttctcctttct

SEQ ID NO: 125509 - DNA, 26 bp, Homo sapiens
agttatcctgaattttctcctttctg

SEQ ID NO: 125510 - DNA, 26 bp, Homo sapiens
gttatcctgaattttctcctttctgc

SEQ ID NO: 125511 - DNA, 26 bp, Homo sapiens
ttatcctgaattttctcctttctgcc

SEQ ID NO: 125512 - DNA, 26 bp, Homo sapiens
tatcctgaattttctcctttctgcct

SEQ ID NO: 125513 - DNA, 26 bp, Homo sapiens
atcctgaattttctcctttctgcctt

SEQ ID NO: 125514 - DNA, 26 bp, Homo sapiens
tcctgaattttctcctttctgccttt

SEQ ID NO: 125515 - DNA, 26 bp, Homo sapiens
cctgaattttctcctttctgcctttc

SEQ ID NO: 125516 - DNA, 26 bp, Homo sapiens
ctgaattttctcctttctgcctttct

SEQ ID NO: 125517 - DNA, 26 bp, Homo sapiens
tgaattttctcctttctgcctttctg

SEQ ID NO: 125518 - DNA, 26 bp, Homo sapiens
gaattttctcctttctgcctttctgc

SEQ ID NO: 125519 - DNA, 26 bp, Homo sapiens
aattttctcctttctgcctttctgca

SEQ ID NO: 125520 - DNA, 26 bp, Homo sapiens
attttctcctttctgcctttctgcat

SEQ ID NO: 125521 - DNA, 26 bp, Homo sapiens
ttttctcctttctgcctttctgcatc

SEQ ID NO: 125522 - DNA, 26 bp, Homo sapiens
tttctcctttctgcctttctgcatct

SEQ ID NO: 125523 - DNA, 26 bp, Homo sapiens
ttctcctttctgcctttctgcatctc

SEQ ID NO: 125524 - DNA, 26 bp, Homo sapiens
tctcctttctgcctttctgcatctct

SEQ ID NO: 125525 - DNA, 26 bp, Homo sapiens
ctcctttctgcctttctgcatctcta

SEQ ID NO: 125526 - DNA, 26 bp, Homo sapiens
tcctttctgcctttctgcatctctac

SEQ ID NO: 125527 - DNA, 26 bp, Homo sapiens
cctttctgcctttctgcatctctacc

SEQ ID NO: 125528 - DNA, 26 bp, Homo sapiens
ctttctgcctttctgcatctctaccc

SEQ ID NO: 125529 - DNA, 26 bp, Homo sapiens
tttctgcctttctgcatctctacccc

SEQ ID NO: 125530 - DNA, 26 bp, Homo sapiens
ttctgcctttctgcatctctacccct

SEQ ID NO: 125531 - DNA, 26 bp, Homo sapiens
tctgcctttctgcatctctaccccta

SEQ ID NO: 125532 - DNA, 26 bp, Homo sapiens
ctgcctttctgcatctctacccctac

SEQ ID NO: 125533 - DNA, 26 bp, Homo sapiens
tgcctttctgcatctctacccctact

SEQ ID NO: 125534 - DNA, 26 bp, Homo sapiens
gcctttctgcatctctacccctactg

SEQ ID NO: 125535 - DNA, 26 bp, Homo sapiens
cctttctgcatctctacccctactgt

SEQ ID NO: 125536 - DNA, 26 bp, Homo sapiens
ctttctgcatctctacccctactgta

SEQ ID NO: 125537 - DNA, 26 bp, Homo sapiens
tttctgcatctctacccctactgtac

SEQ ID NO: 125538 - DNA, 26 bp, Homo sapiens
ttctgcatctctacccctactgtaca

SEQ ID NO: 125539 - DNA, 26 bp, Homo sapiens
tctgcatctctacccctactgtacag

SEQ ID NO: 125540 - DNA, 26 bp, Homo sapiens
ctgcatctctacccctactgtacagt

SEQ ID NO: 125541 - DNA, 26 bp, Homo sapiens
tgcatctctacccctactgtacagta

SEQ ID NO: 125542 - DNA, 26 bp, Homo sapiens
gcatctctacccctactgtacagtag

SEQ ID NO: 125543 - DNA, 26 bp, Homo sapiens
catctctacccctactgtacagtagg

SEQ ID NO: 125544 - DNA, 26 bp, Homo sapiens
atctctacccctactgtacagtaggt

SEQ ID NO: 125545 - DNA, 26 bp, Homo sapiens
tctctacccctactgtacagtaggtt

SEQ ID NO: 125546 - DNA, 26 bp, Homo sapiens
ctctacccctactgtacagtaggttt

SEQ ID NO: 125547 - DNA, 26 bp, Homo sapiens
tctacccctactgtacagtaggtttg

SEQ ID NO: 125548 - DNA, 26 bp, Homo sapiens
ctacccctactgtacagtaggtttgc

SEQ ID NO: 125549 - DNA, 26 bp, Homo sapiens
tacccctactgtacagtaggtttgct

SEQ ID NO: 125550 - DNA, 26 bp, Homo sapiens
acccctactgtacagtaggtttgctg

SEQ ID NO: 125551 - DNA, 26 bp, Homo sapiens
cccctactgtacagtaggtttgctgg

SEQ ID NO: 125552 - DNA, 26 bp, Homo sapiens
ccctactgtacagtaggtttgctggc

SEQ ID NO: 125553 - DNA, 26 bp, Homo sapiens
cctactgtacagtaggtttgctggca

SEQ ID NO: 125554 - DNA, 26 bp, Homo sapiens
ctactgtacagtaggtttgctggcat

SEQ ID NO: 125555 - DNA, 26 bp, Homo sapiens
tactgtacagtaggtttgctggcatt

SEQ ID NO: 125556 - DNA, 26 bp, Homo sapiens
actgtacagtaggtttgctggcattt

SEQ ID NO: 125557 - DNA, 26 bp, Homo sapiens
ctgtacagtaggtttgctggcattta

SEQ ID NO: 125558 - DNA, 26 bp, Homo sapiens
tgtacagtaggtttgctggcatttac

SEQ ID NO: 125559 - DNA, 26 bp, Homo sapiens
gtacagtaggtttgctggcatttacc

SEQ ID NO: 125560 - DNA, 26 bp, Homo sapiens
tacagtaggtttgctggcatttaccc

SEQ ID NO: 125561 - DNA, 26 bp, Homo sapiens
acagtaggtttgctggcatttaccct

SEQ ID NO: 125562 - DNA, 26 bp, Homo sapiens
cagtaggtttgctggcatttaccctc

SEQ ID NO: 125563 - DNA, 26 bp, Homo sapiens
agtaggtttgctggcatttaccctcc

SEQ ID NO: 125564 - DNA, 26 bp, Homo sapiens
gtaggtttgctggcatttaccctccg

SEQ ID NO: 125565 - DNA, 26 bp, Homo sapiens
taggtttgctggcatttaccctccga

SEQ ID NO: 125566 - DNA, 26 bp, Homo sapiens
aggtttgctggcatttaccctccgat

SEQ ID NO: 125567 - DNA, 26 bp, Homo sapiens
ggtttgctggcatttaccctccgatt

SEQ ID NO: 125568 - DNA, 26 bp, Homo sapiens
gtttgctggcatttaccctccgattg

SEQ ID NO: 125569 - DNA, 26 bp, Homo sapiens
tttgctggcatttaccctccgattgg

SEQ ID NO: 125570 - DNA, 26 bp, Homo sapiens
ttgctggcatttaccctccgattgga

SEQ ID NO: 125571 - DNA, 26 bp, Homo sapiens
tgctggcatttaccctccgattggat

SEQ ID NO: 125572 - DNA, 26 bp, Homo sapiens
gctggcatttaccctccgattggatt

SEQ ID NO: 125573 - DNA, 26 bp, Homo sapiens
ctggcatttaccctccgattggattg

SEQ ID NO: 125574 - DNA, 26 bp, Homo sapiens
tggcatttaccctccgattggattgc

SEQ ID NO: 125575 - DNA, 26 bp, Homo sapiens
ggcatttaccctccgattggattgct

SEQ ID NO: 125576 - DNA, 26 bp, Homo sapiens
gcatttaccctccgattggattgctc

SEQ ID NO: 125577 - DNA, 26 bp, Homo sapiens
catttaccctccgattggattgctca

SEQ ID NO: 125578 - DNA, 26 bp, Homo sapiens
atttaccctccgattggattgctcaa

SEQ ID NO: 125579 - DNA, 26 bp, Homo sapiens
tttaccctccgattggattgctcaat

SEQ ID NO: 125580 - DNA, 26 bp, Homo sapiens
ttaccctccgattggattgctcaatc

SEQ ID NO: 125581 - DNA, 26 bp, Homo sapiens
taccctccgattggattgctcaatct

SEQ ID NO: 125582 - DNA, 26 bp, Homo sapiens
accctccgattggattgctcaatctg

SEQ ID NO: 125583 - DNA, 26 bp, Homo sapiens
ccctccgattggattgctcaatctgt

SEQ ID NO: 125584 - DNA, 26 bp, Homo sapiens
cctccgattggattgctcaatctgtc

SEQ ID NO: 125585 - DNA, 26 bp, Homo sapiens
ctccgattggattgctcaatctgtct

SEQ ID NO: 125586 - DNA, 26 bp, Homo sapiens
tccgattggattgctcaatctgtctt

SEQ ID NO: 125587 - DNA, 26 bp, Homo sapiens
ccgattggattgctcaatctgtcttc

SEQ ID NO: 125588 - DNA, 26 bp, Homo sapiens
cgattggattgctcaatctgtcttcc

SEQ ID NO: 125589 - DNA, 26 bp, Homo sapiens
gattggattgctcaatctgtcttcct

SEQ ID NO: 125590 - DNA, 26 bp, Homo sapiens
attggattgctcaatctgtcttcctc

SEQ ID NO: 125591 - DNA, 26 bp, Homo sapiens
ttggattgctcaatctgtcttcctca

SEQ ID NO: 125592 - DNA, 26 bp, Homo sapiens
tggattgctcaatctgtcttcctcat

SEQ ID NO: 125593 - DNA, 26 bp, Homo sapiens
ggattgctcaatctgtcttcctcatt

SEQ ID NO: 125594 - DNA, 26 bp, Homo sapiens
gattgctcaatctgtcttcctcattt

SEQ ID NO: 125595 - DNA, 26 bp, Homo sapiens
attgctcaatctgtcttcctcatttc

SEQ ID NO: 125596 - DNA, 26 bp, Homo sapiens
ttgctcaatctgtcttcctcatttca

SEQ ID NO: 125597 - DNA, 26 bp, Homo sapiens
tgctcaatctgtcttcctcatttcac

SEQ ID NO: 125598 - DNA, 26 bp, Homo sapiens
gctcaatctgtcttcctcatttcact

SEQ ID NO: 125599 - DNA, 26 bp, Homo sapiens
ctcaatctgtcttcctcatttcactt

SEQ ID NO: 125600 - DNA, 26 bp, Homo sapiens
tcaatctgtcttcctcatttcacttt

SEQ ID NO: 125601 - DNA, 26 bp, Homo sapiens
caatctgtcttcctcatttcactttc

SEQ ID NO: 125602 - DNA, 26 bp, Homo sapiens
aatctgtcttcctcatttcactttca

SEQ ID NO: 125603 - DNA, 26 bp, Homo sapiens
atctgtcttcctcatttcactttcag

SEQ ID NO: 125604 - DNA, 26 bp, Homo sapiens
tctgtcttcctcatttcactttcagt

SEQ ID NO: 125605 - DNA, 26 bp, Homo sapiens
ctgtcttcctcatttcactttcagtt

SEQ ID NO: 125606 - DNA, 26 bp, Homo sapiens
tgtcttcctcatttcactttcagttt

SEQ ID NO: 125607 - DNA, 26 bp, Homo sapiens
gtcttcctcatttcactttcagtttt

SEQ ID NO: 125608 - DNA, 26 bp, Homo sapiens
tcttcctcatttcactttcagttttt

SEQ ID NO: 125609 - DNA, 26 bp, Homo sapiens
cttcctcatttcactttcagtttttg

SEQ ID NO: 125610 - DNA, 26 bp, Homo sapiens
ttcctcatttcactttcagtttttgt

SEQ ID NO: 125611 - DNA, 26 bp, Homo sapiens
tcctcatttcactttcagtttttgta

SEQ ID NO: 125612 - DNA, 26 bp, Homo sapiens
cctcatttcactttcagtttttgtaa

SEQ ID NO: 125613 - DNA, 26 bp, Homo sapiens
ctcatttcactttcagtttttgtaag

SEQ ID NO: 125614 - DNA, 26 bp, Homo sapiens
tcatttcactttcagtttttgtaaga

SEQ ID NO: 125615 - DNA, 26 bp, Homo sapiens
catttcactttcagtttttgtaagaa

SEQ ID NO: 125616 - DNA, 26 bp, Homo sapiens
atttcactttcagtttttgtaagaat

SEQ ID NO: 125617 - DNA, 26 bp, Homo sapiens
tttcactttcagtttttgtaagaatt

SEQ ID NO: 125618 - DNA, 26 bp, Homo sapiens
ttcactttcagtttttgtaagaattt

SEQ ID NO: 125619 - DNA, 26 bp, Homo sapiens
tttcagagaaaagaggtttattgggc

SEQ ID NO: 125620 - DNA, 26 bp, Homo sapiens
ttcagagaaaagaggtttattgggct

SEQ ID NO: 125621 - DNA, 26 bp, Homo sapiens
tcagagaaaagaggtttattgggctt

SEQ ID NO: 125622 - DNA, 26 bp, Homo sapiens
cagagaaaagaggtttattgggcttc

SEQ ID NO: 125623 - DNA, 26 bp, Homo sapiens
agagaaaagaggtttattgggcttca

SEQ ID NO: 125624 - DNA, 26 bp, Homo sapiens
gagaaaagaggtttattgggcttcat

SEQ ID NO: 125625 - DNA, 26 bp, Homo sapiens
agaaaagaggtttattgggcttcatc

SEQ ID NO: 125626 - DNA, 26 bp, Homo sapiens
gaaaagaggtttattgggcttcatcg

SEQ ID NO: 125627 - DNA, 26 bp, Homo sapiens
aaaagaggtttattgggcttcatcga

SEQ ID NO: 125628 - DNA, 26 bp, Homo sapiens
aaagaggtttattgggcttcatcgag

SEQ ID NO: 125629 - DNA, 26 bp, Homo sapiens
aagaggtttattgggcttcatcgagg

SEQ ID NO: 125630 - DNA, 26 bp, Homo sapiens
agaggtttattgggcttcatcgaggg

SEQ ID NO: 125631 - DNA, 26 bp, Homo sapiens
gaggtttattgggcttcatcgagggt

SEQ ID NO: 125632 - DNA, 26 bp, Homo sapiens
aggtttattgggcttcatcgagggtg

SEQ ID NO: 125633 - DNA, 26 bp, Homo sapiens
ggtttattgggcttcatcgagggtgc

SEQ ID NO: 125634 - DNA, 26 bp, Homo sapiens
gtttattgggcttcatcgagggtgca

SEQ ID NO: 125635 - DNA, 26 bp, Homo sapiens
tttattgggcttcatcgagggtgcag

SEQ ID NO: 125636 - DNA, 26 bp, Homo sapiens
ttattgggcttcatcgagggtgcaga

SEQ ID NO: 125637 - DNA, 26 bp, Homo sapiens
tattgggcttcatcgagggtgcagat

SEQ ID NO: 125638 - DNA, 26 bp, Homo sapiens
attgggcttcatcgagggtgcagatg

SEQ ID NO: 125639 - DNA, 26 bp, Homo sapiens
ttgggcttcatcgagggtgcagatgc

SEQ ID NO: 125640 - DNA, 26 bp, Homo sapiens
tgggcttcatcgagggtgcagatgcc

SEQ ID NO: 125641 - DNA, 26 bp, Homo sapiens
gggcttcatcgagggtgcagatgcct

SEQ ID NO: 125642 - DNA, 26 bp, Homo sapiens
ggcttcatcgagggtgcagatgcctc

SEQ ID NO: 125643 - DNA, 26 bp, Homo sapiens
gcttcatcgagggtgcagatgcctcc

SEQ ID NO: 125644 - DNA, 26 bp, Homo sapiens
cttcatcgagggtgcagatgcctccg

SEQ ID NO: 125645 - DNA, 26 bp, Homo sapiens
ttcatcgagggtgcagatgcctccgt

SEQ ID NO: 125646 - DNA, 26 bp, Homo sapiens
tcatcgagggtgcagatgcctccgtg

SEQ ID NO: 125647 - DNA, 26 bp, Homo sapiens
catcgagggtgcagatgcctccgtgt

SEQ ID NO: 125648 - DNA, 26 bp, Homo sapiens
atcgagggtgcagatgcctccgtgtg

SEQ ID NO: 125649 - DNA, 26 bp, Homo sapiens
tcgagggtgcagatgcctccgtgtgg

SEQ ID NO: 125650 - DNA, 26 bp, Homo sapiens
cgagggtgcagatgcctccgtgtggg

SEQ ID NO: 125651 - DNA, 26 bp, Homo sapiens
gagggtgcagatgcctccgtgtgggg

SEQ ID NO: 125652 - DNA, 26 bp, Homo sapiens
agggtgcagatgcctccgtgtggggc

SEQ ID NO: 125653 - DNA, 26 bp, Homo sapiens
gggtgcagatgcctccgtgtggggct

SEQ ID NO: 125654 - DNA, 26 bp, Homo sapiens
ggtgcagatgcctccgtgtggggctc

SEQ ID NO: 125655 - DNA, 26 bp, Homo sapiens
gtgcagatgcctccgtgtggggctct

SEQ ID NO: 125656 - DNA, 26 bp, Homo sapiens
tgcagatgcctccgtgtggggctctg

SEQ ID NO: 125657 - DNA, 26 bp, Homo sapiens
gcagatgcctccgtgtggggctctgg

SEQ ID NO: 125658 - DNA, 26 bp, Homo sapiens
cagatgcctccgtgtggggctctggt

SEQ ID NO: 125659 - DNA, 26 bp, Homo sapiens
agatgcctccgtgtggggctctggtc

SEQ ID NO: 125660 - DNA, 26 bp, Homo sapiens
gatgcctccgtgtggggctctggtcg

SEQ ID NO: 125661 - DNA, 26 bp, Homo sapiens
atgcctccgtgtggggctctggtcgg

SEQ ID NO: 125662 - DNA, 26 bp, Homo sapiens
tgcctccgtgtggggctctggtcggc

SEQ ID NO: 125663 - DNA, 26 bp, Homo sapiens
gcctccgtgtggggctctggtcggca

SEQ ID NO: 125664 - DNA, 26 bp, Homo sapiens
cctccgtgtggggctctggtcggcag

SEQ ID NO: 125665 - DNA, 26 bp, Homo sapiens
ctccgtgtggggctctggtcggcagc

SEQ ID NO: 125666 - DNA, 26 bp, Homo sapiens
tccgtgtggggctctggtcggcagct

SEQ ID NO: 125667 - DNA, 26 bp, Homo sapiens
ccgtgtggggctctggtcggcagctg

SEQ ID NO: 125668 - DNA, 26 bp, Homo sapiens
cgtgtggggctctggtcggcagctgg

SEQ ID NO: 125669 - DNA, 26 bp, Homo sapiens
gtgtggggctctggtcggcagctggc

SEQ ID NO: 125670 - DNA, 26 bp, Homo sapiens
tgtggggctctggtcggcagctggct

SEQ ID NO: 125671 - DNA, 26 bp, Homo sapiens
gtggggctctggtcggcagctggctt

SEQ ID NO: 125672 - DNA, 26 bp, Homo sapiens
tggggctctggtcggcagctggcttt

SEQ ID NO: 125673 - DNA, 26 bp, Homo sapiens
ggggctctggtcggcagctggctttc

SEQ ID NO: 125674 - DNA, 26 bp, Homo sapiens
gggctctggtcggcagctggctttca

SEQ ID NO: 125675 - DNA, 26 bp, Homo sapiens
ggctctggtcggcagctggctttcag

SEQ ID NO: 125676 - DNA, 26 bp, Homo sapiens
gctctggtcggcagctggctttcaga

SEQ ID NO: 125677 - DNA, 26 bp, Homo sapiens
ctctggtcggcagctggctttcagag

SEQ ID NO: 125678 - DNA, 26 bp, Homo sapiens
tctggtcggcagctggctttcagagc

SEQ ID NO: 125679 - DNA, 26 bp, Homo sapiens
ctggtcggcagctggctttcagagcc

SEQ ID NO: 125680 - DNA, 26 bp, Homo sapiens
tggtcggcagctggctttcagagcct

SEQ ID NO: 125681 - DNA, 26 bp, Homo sapiens
ggtcggcagctggctttcagagcctt

SEQ ID NO: 125682 - DNA, 26 bp, Homo sapiens
gtcggcagctggctttcagagccttt

SEQ ID NO: 125683 - DNA, 26 bp, Homo sapiens
tcggcagctggctttcagagcctttc

SEQ ID NO: 125684 - DNA, 26 bp, Homo sapiens
cggcagctggctttcagagcctttcc

SEQ ID NO: 125685 - DNA, 26 bp, Homo sapiens
ggcagctggctttcagagcctttccc

SEQ ID NO: 125686 - DNA, 26 bp, Homo sapiens
gcagctggctttcagagcctttccct

SEQ ID NO: 125687 - DNA, 26 bp, Homo sapiens
cagctggctttcagagcctttccctg

SEQ ID NO: 125688 - DNA, 26 bp, Homo sapiens
agctggctttcagagcctttccctgc

SEQ ID NO: 125689 - DNA, 26 bp, Homo sapiens
gctggctttcagagcctttccctgcc

SEQ ID NO: 125690 - DNA, 26 bp, Homo sapiens
ctggctttcagagcctttccctgcct

SEQ ID NO: 125691 - DNA, 26 bp, Homo sapiens
tggctttcagagcctttccctgcctt

SEQ ID NO: 125692 - DNA, 26 bp, Homo sapiens
ggctttcagagcctttccctgccttc

SEQ ID NO: 125693 - DNA, 26 bp, Homo sapiens
gctttcagagcctttccctgccttct

SEQ ID NO: 125694 - DNA, 26 bp, Homo sapiens
ctttcagagcctttccctgccttctg

SEQ ID NO: 125695 - DNA, 26 bp, Homo sapiens
tttcagagcctttccctgccttctgg

SEQ ID NO: 125696 - DNA, 26 bp, Homo sapiens
ttcagagcctttccctgccttctggg

SEQ ID NO: 125697 - DNA, 26 bp, Homo sapiens
tcagagcctttccctgccttctgggg

SEQ ID NO: 125698 - DNA, 26 bp, Homo sapiens
cagagcctttccctgccttctggggc

SEQ ID NO: 125699 - DNA, 26 bp, Homo sapiens
agagcctttccctgccttctggggcc

SEQ ID NO: 125700 - DNA, 26 bp, Homo sapiens
gagcctttccctgccttctggggccc

SEQ ID NO: 125701 - DNA, 26 bp, Homo sapiens
agcctttccctgccttctggggccct

SEQ ID NO: 125702 - DNA, 26 bp, Homo sapiens
gcctttccctgccttctggggccctg

SEQ ID NO: 125703 - DNA, 26 bp, Homo sapiens
cctttccctgccttctggggccctgt

SEQ ID NO: 125704 - DNA, 26 bp, Homo sapiens
ctttccctgccttctggggccctgtg

SEQ ID NO: 125705 - DNA, 26 bp, Homo sapiens
tttccctgccttctggggccctgtga

SEQ ID NO: 125706 - DNA, 26 bp, Homo sapiens
ttccctgccttctggggccctgtgat

SEQ ID NO: 125707 - DNA, 26 bp, Homo sapiens
tccctgccttctggggccctgtgatc

SEQ ID NO: 125708 - DNA, 26 bp, Homo sapiens
ccctgccttctggggccctgtgatcc

SEQ ID NO: 125709 - DNA, 26 bp, Homo sapiens
cctgccttctggggccctgtgatccc

SEQ ID NO: 125710 - DNA, 26 bp, Homo sapiens
ctgccttctggggccctgtgatccct

SEQ ID NO: 125711 - DNA, 26 bp, Homo sapiens
tgccttctggggccctgtgatccctc

SEQ ID NO: 125712 - DNA, 26 bp, Homo sapiens
gccttctggggccctgtgatccctca

SEQ ID NO: 125713 - DNA, 26 bp, Homo sapiens
ccttctggggccctgtgatccctcat

SEQ ID NO: 125714 - DNA, 26 bp, Homo sapiens
cttctggggccctgtgatccctcatg

SEQ ID NO: 125715 - DNA, 26 bp, Homo sapiens
ttctggggccctgtgatccctcatgc

SEQ ID NO: 125716 - DNA, 26 bp, Homo sapiens
tctggggccctgtgatccctcatgcc

SEQ ID NO: 125717 - DNA, 26 bp, Homo sapiens
ctggggccctgtgatccctcatgcct

SEQ ID NO: 125718 - DNA, 26 bp, Homo sapiens
tggggccctgtgatccctcatgccta

SEQ ID NO: 125719 - DNA, 26 bp, Homo sapiens
ggggccctgtgatccctcatgcctac

SEQ ID NO: 125720 - DNA, 26 bp, Homo sapiens
gggccctgtgatccctcatgcctact

SEQ ID NO: 125721 - DNA, 26 bp, Homo sapiens
ggccctgtgatccctcatgcctactt

SEQ ID NO: 125722 - DNA, 26 bp, Homo sapiens
gccctgtgatccctcatgcctacttc

SEQ ID NO: 125723 - DNA, 26 bp, Homo sapiens
ccctgtgatccctcatgcctacttct

SEQ ID NO: 125724 - DNA, 26 bp, Homo sapiens
cctgtgatccctcatgcctacttctt

SEQ ID NO: 125725 - DNA, 26 bp, Homo sapiens
ctgtgatccctcatgcctacttcttt

SEQ ID NO: 125726 - DNA, 26 bp, Homo sapiens
tgtgatccctcatgcctacttctttc

SEQ ID NO: 125727 - DNA, 26 bp, Homo sapiens
gtgatccctcatgcctacttctttct

SEQ ID NO: 125728 - DNA, 26 bp, Homo sapiens
tgatccctcatgcctacttctttctc

SEQ ID NO: 125729 - DNA, 26 bp, Homo sapiens
gatccctcatgcctacttctttctct

SEQ ID NO: 125730 - DNA, 26 bp, Homo sapiens
atccctcatgcctacttctttctctc

SEQ ID NO: 125731 - DNA, 26 bp, Homo sapiens
tccctcatgcctacttctttctctct

SEQ ID NO: 125732 - DNA, 26 bp, Homo sapiens
ccctcatgcctacttctttctctctt

SEQ ID NO: 125733 - DNA, 26 bp, Homo sapiens
cctcatgcctacttctttctctcttg

SEQ ID NO: 125734 - DNA, 26 bp, Homo sapiens
ctcatgcctacttctttctctcttgg

SEQ ID NO: 125735 - DNA, 26 bp, Homo sapiens
tcatgcctacttctttctctcttggt

SEQ ID NO: 125736 - DNA, 26 bp, Homo sapiens
catgcctacttctttctctcttggtc

SEQ ID NO: 125737 - DNA, 26 bp, Homo sapiens
atgcctacttctttctctcttggtca

SEQ ID NO: 125738 - DNA, 26 bp, Homo sapiens
tgcctacttctttctctcttggtcag

SEQ ID NO: 125739 - DNA, 26 bp, Homo sapiens
gcctacttctttctctcttggtcagc

SEQ ID NO: 125740 - DNA, 26 bp, Homo sapiens
cctacttctttctctcttggtcagcc

SEQ ID NO: 125741 - DNA, 26 bp, Homo sapiens
ctacttctttctctcttggtcagcct

SEQ ID NO: 125742 - DNA, 26 bp, Homo sapiens
tacttctttctctcttggtcagcctt

SEQ ID NO: 125743 - DNA, 26 bp, Homo sapiens
acttctttctctcttggtcagccttg

SEQ ID NO: 125744 - DNA, 26 bp, Homo sapiens
cttctttctctcttggtcagccttgt

SEQ ID NO: 125745 - DNA, 26 bp, Homo sapiens
ttctttctctcttggtcagccttgtg

SEQ ID NO: 125746 - DNA, 26 bp, Homo sapiens
tctttctctcttggtcagccttgtgc

SEQ ID NO: 125747 - DNA, 26 bp, Homo sapiens
ctttctctcttggtcagccttgtgcg

SEQ ID NO: 125748 - DNA, 26 bp, Homo sapiens
tttctctcttggtcagccttgtgcgc

SEQ ID NO: 125749 - DNA, 26 bp, Homo sapiens
ttctctcttggtcagccttgtgcgca

SEQ ID NO: 125750 - DNA, 26 bp, Homo sapiens
tctctcttggtcagccttgtgcgcat

SEQ ID NO: 125751 - DNA, 26 bp, Homo sapiens
ctctcttggtcagccttgtgcgcatg

SEQ ID NO: 125752 - DNA, 26 bp, Homo sapiens
tctcttggtcagccttgtgcgcatgc

SEQ ID NO: 125753 - DNA, 26 bp, Homo sapiens
ctcttggtcagccttgtgcgcatgcc

SEQ ID NO: 125754 - DNA, 26 bp, Homo sapiens
tcttggtcagccttgtgcgcatgccc

SEQ ID NO: 125755 - DNA, 26 bp, Homo sapiens
cttggtcagccttgtgcgcatgccct

SEQ ID NO: 125756 - DNA, 26 bp, Homo sapiens
ttggtcagccttgtgcgcatgccctc

SEQ ID NO: 125757 - DNA, 26 bp, Homo sapiens
tggtcagccttgtgcgcatgccctct

SEQ ID NO: 125758 - DNA, 26 bp, Homo sapiens
ggtcagccttgtgcgcatgccctctc

SEQ ID NO: 125759 - DNA, 26 bp, Homo sapiens
gtcagccttgtgcgcatgccctctca

SEQ ID NO: 125760 - DNA, 26 bp, Homo sapiens
tcagccttgtgcgcatgccctctcac

SEQ ID NO: 125761 - DNA, 26 bp, Homo sapiens
cagccttgtgcgcatgccctctcact

SEQ ID NO: 125762 - DNA, 26 bp, Homo sapiens
agccttgtgcgcatgccctctcactc

SEQ ID NO: 125763 - DNA, 26 bp, Homo sapiens
gccttgtgcgcatgccctctcactct

SEQ ID NO: 125764 - DNA, 26 bp, Homo sapiens
ccttgtgcgcatgccctctcactctt

SEQ ID NO: 125765 - DNA, 26 bp, Homo sapiens
cttgtgcgcatgccctctcactcttc

SEQ ID NO: 125766 - DNA, 26 bp, Homo sapiens
ttgtgcgcatgccctctcactcttca

SEQ ID NO: 125767 - DNA, 26 bp, Homo sapiens
tgtgcgcatgccctctcactcttcat

SEQ ID NO: 125768 - DNA, 26 bp, Homo sapiens
gtgcgcatgccctctcactcttcatc

SEQ ID NO: 125769 - DNA, 26 bp, Homo sapiens
tgcgcatgccctctcactcttcatct

SEQ ID NO: 125770 - DNA, 26 bp, Homo sapiens
gcgcatgccctctcactcttcatctc

SEQ ID NO: 125771 - DNA, 26 bp, Homo sapiens
cgcatgccctctcactcttcatctct

SEQ ID NO: 125772 - DNA, 26 bp, Homo sapiens
gcatgccctctcactcttcatctctt

SEQ ID NO: 125773 - DNA, 26 bp, Homo sapiens
catgccctctcactcttcatctcttg

SEQ ID NO: 125774 - DNA, 26 bp, Homo sapiens
atgccctctcactcttcatctcttgg

SEQ ID NO: 125775 - DNA, 26 bp, Homo sapiens
tgccctctcactcttcatctcttggg

SEQ ID NO: 125776 - DNA, 26 bp, Homo sapiens
gccctctcactcttcatctcttgggc

SEQ ID NO: 125777 - DNA, 26 bp, Homo sapiens
ccctctcactcttcatctcttgggcc

SEQ ID NO: 125778 - DNA, 26 bp, Homo sapiens
cctctcactcttcatctcttgggcct

SEQ ID NO: 125779 - DNA, 26 bp, Homo sapiens
ctctcactcttcatctcttgggcctg

SEQ ID NO: 125780 - DNA, 26 bp, Homo sapiens
tctcactcttcatctcttgggcctgt

SEQ ID NO: 125781 - DNA, 26 bp, Homo sapiens
ctcactcttcatctcttgggcctgtc

SEQ ID NO: 125782 - DNA, 26 bp, Homo sapiens
tcactcttcatctcttgggcctgtct

SEQ ID NO: 125783 - DNA, 26 bp, Homo sapiens
cactcttcatctcttgggcctgtctc

SEQ ID NO: 125784 - DNA, 26 bp, Homo sapiens
actcttcatctcttgggcctgtctct

SEQ ID NO: 125785 - DNA, 26 bp, Homo sapiens
ctcttcatctcttgggcctgtctctg

SEQ ID NO: 125786 - DNA, 26 bp, Homo sapiens
tcttcatctcttgggcctgtctctgt

SEQ ID NO: 125787 - DNA, 26 bp, Homo sapiens
cttcatctcttgggcctgtctctgtt

SEQ ID NO: 125788 - DNA, 26 bp, Homo sapiens
ttcatctcttgggcctgtctctgttt

SEQ ID NO: 125789 - DNA, 26 bp, Homo sapiens
tcatctcttgggcctgtctctgtttc

SEQ ID NO: 125790 - DNA, 26 bp, Homo sapiens
catctcttgggcctgtctctgtttct

SEQ ID NO: 125791 - DNA, 26 bp, Homo sapiens
atctcttgggcctgtctctgtttctc

SEQ ID NO: 125792 - DNA, 26 bp, Homo sapiens
tctcttgggcctgtctctgtttctcc

SEQ ID NO: 125793 - DNA, 26 bp, Homo sapiens
ctcttgggcctgtctctgtttctcct

SEQ ID NO: 125794 - DNA, 26 bp, Homo sapiens
tcttgggcctgtctctgtttctcctt

SEQ ID NO: 125795 - DNA, 26 bp, Homo sapiens
cttgggcctgtctctgtttctccttg

SEQ ID NO: 125796 - DNA, 26 bp, Homo sapiens
ttgggcctgtctctgtttctccttgg

SEQ ID NO: 125797 - DNA, 26 bp, Homo sapiens
tgggcctgtctctgtttctccttgga

SEQ ID NO: 125798 - DNA, 26 bp, Homo sapiens
gggcctgtctctgtttctccttggat

SEQ ID NO: 125799 - DNA, 26 bp, Homo sapiens
ggcctgtctctgtttctccttggatg

SEQ ID NO: 125800 - DNA, 26 bp, Homo sapiens
gcctgtctctgtttctccttggatgt

SEQ ID NO: 125801 - DNA, 26 bp, Homo sapiens
cctgtctctgtttctccttggatgtt

SEQ ID NO: 125802 - DNA, 26 bp, Homo sapiens
ctgtctctgtttctccttggatgttc

SEQ ID NO: 125803 - DNA, 26 bp, Homo sapiens
tgtctctgtttctccttggatgttct

SEQ ID NO: 125804 - DNA, 26 bp, Homo sapiens
gtctctgtttctccttggatgttctt

SEQ ID NO: 125805 - DNA, 26 bp, Homo sapiens
tctctgtttctccttggatgttcttc

SEQ ID NO: 125806 - DNA, 26 bp, Homo sapiens
ctctgtttctccttggatgttcttct

SEQ ID NO: 125807 - DNA, 26 bp, Homo sapiens
tctgtttctccttggatgttcttcta

SEQ ID NO: 125808 - DNA, 26 bp, Homo sapiens
ctgtttctccttggatgttcttctat

SEQ ID NO: 125809 - DNA, 26 bp, Homo sapiens
tgtttctccttggatgttcttctatt

SEQ ID NO: 125810 - DNA, 26 bp, Homo sapiens
gtttctccttggatgttcttctatta

SEQ ID NO: 125811 - DNA, 26 bp, Homo sapiens
tttctccttggatgttcttctattat

SEQ ID NO: 125812 - DNA, 26 bp, Homo sapiens
ttctccttggatgttcttctattatt

SEQ ID NO: 125813 - DNA, 26 bp, Homo sapiens
tctccttggatgttcttctattattc

SEQ ID NO: 125814 - DNA, 26 bp, Homo sapiens
ctccttggatgttcttctattattcc

SEQ ID NO: 125815 - DNA, 26 bp, Homo sapiens
tccttggatgttcttctattattccc

SEQ ID NO: 125816 - DNA, 26 bp, Homo sapiens
ccttggatgttcttctattattcccc

SEQ ID NO: 125817 - DNA, 26 bp, Homo sapiens
cttggatgttcttctattattcccct

SEQ ID NO: 125818 - DNA, 26 bp, Homo sapiens
ttggatgttcttctattattcccctc

SEQ ID NO: 125819 - DNA, 26 bp, Homo sapiens
tggatgttcttctattattcccctct

SEQ ID NO: 125820 - DNA, 26 bp, Homo sapiens
ggatgttcttctattattcccctctc

SEQ ID NO: 125821 - DNA, 26 bp, Homo sapiens
gatgttcttctattattcccctctct

SEQ ID NO: 125822 - DNA, 26 bp, Homo sapiens
atgttcttctattattcccctctctc

SEQ ID NO: 125823 - DNA, 26 bp, Homo sapiens
tgttcttctattattcccctctctcc

SEQ ID NO: 125824 - DNA, 26 bp, Homo sapiens
gttcttctattattcccctctctcca

SEQ ID NO: 125825 - DNA, 26 bp, Homo sapiens
ttcttctattattcccctctctccat

SEQ ID NO: 125826 - DNA, 26 bp, Homo sapiens
tcttctattattcccctctctccatc

SEQ ID NO: 125827 - DNA, 26 bp, Homo sapiens
cttctattattcccctctctccatcc

SEQ ID NO: 125828 - DNA, 26 bp, Homo sapiens
ttctattattcccctctctccatcct

SEQ ID NO: 125829 - DNA, 26 bp, Homo sapiens
tctattattcccctctctccatcctc

SEQ ID NO: 125830 - DNA, 26 bp, Homo sapiens
ctattattcccctctctccatcctcc

SEQ ID NO: 125831 - DNA, 26 bp, Homo sapiens
tattattcccctctctccatcctcca

SEQ ID NO: 125832 - DNA, 26 bp, Homo sapiens
attattcccctctctccatcctccat

SEQ ID NO: 125833 - DNA, 26 bp, Homo sapiens
ttattcccctctctccatcctccata

SEQ ID NO: 125834 - DNA, 26 bp, Homo sapiens
tattcccctctctccatcctccataa

SEQ ID NO: 125835 - DNA, 26 bp, Homo sapiens
attcccctctctccatcctccataaa

SEQ ID NO: 125836 - DNA, 26 bp, Homo sapiens
ttcccctctctccatcctccataaat

SEQ ID NO: 125837 - DNA, 26 bp, Homo sapiens
tcccctctctccatcctccataaata

SEQ ID NO: 125838 - DNA, 26 bp, Homo sapiens
cccctctctccatcctccataaataa

SEQ ID NO: 125839 - DNA, 26 bp, Homo sapiens
ccctctctccatcctccataaataaa

SEQ ID NO: 125840 - DNA, 26 bp, Homo sapiens
cctctctccatcctccataaataaat

SEQ ID NO: 125841 - DNA, 26 bp, Homo sapiens
ctctctccatcctccataaataaata

SEQ ID NO: 125842 - DNA, 26 bp, Homo sapiens
tctctccatcctccataaataaataa

SEQ ID NO: 125843 - DNA, 26 bp, Homo sapiens
ctctccatcctccataaataaataat

SEQ ID NO: 125844 - DNA, 26 bp, Homo sapiens
tctccatcctccataaataaataatt

SEQ ID NO: 125845 - DNA, 26 bp, Homo sapiens
ctccatcctccataaataaataattt

SEQ ID NO: 125846 - DNA, 26 bp, Homo sapiens
tccatcctccataaataaataattta

SEQ ID NO: 125847 - DNA, 26 bp, Homo sapiens
ccatcctccataaataaataatttaa

SEQ ID NO: 125848 - DNA, 26 bp, Homo sapiens
catcctccataaataaataatttaat

SEQ ID NO: 125849 - DNA, 26 bp, Homo sapiens
atcctccataaataaataatttaatt

SEQ ID NO: 125850 - DNA, 26 bp, Homo sapiens
tcctccataaataaataatttaattt

SEQ ID NO: 125851 - DNA, 26 bp, Homo sapiens
cctccataaataaataatttaatttt

SEQ ID NO: 125852 - DNA, 26 bp, Homo sapiens
ctccataaataaataatttaattttt

SEQ ID NO: 125853 - DNA, 26 bp, Homo sapiens
tccataaataaataatttaatttttt

SEQ ID NO: 125854 - DNA, 26 bp, Homo sapiens
ccataaataaataatttaattttttt

SEQ ID NO: 125855 - DNA, 26 bp, Homo sapiens
cataaataaataatttaatttttttg

SEQ ID NO: 125856 - DNA, 26 bp, Homo sapiens
ataaataaataatttaatttttttgc

SEQ ID NO: 125857 - DNA, 26 bp, Homo sapiens
taaataaataatttaatttttttgcc

SEQ ID NO: 125858 - DNA, 26 bp, Homo sapiens
aaataaataatttaatttttttgcct

SEQ ID NO: 125859 - DNA, 26 bp, Homo sapiens
aataaataatttaatttttttgcctt

SEQ ID NO: 125860 - DNA, 26 bp, Homo sapiens
ataaataatttaatttttttgccttc

SEQ ID NO: 125861 - DNA, 26 bp, Homo sapiens
taaataatttaatttttttgccttca

SEQ ID NO: 125862 - DNA, 26 bp, Homo sapiens
aaataatttaatttttttgccttcat

SEQ ID NO: 125863 - DNA, 26 bp, Homo sapiens
aataatttaatttttttgccttcata

SEQ ID NO: 125864 - DNA, 26 bp, Homo sapiens
ataatttaatttttttgccttcataa

SEQ ID NO: 125865 - DNA, 26 bp, Homo sapiens
taatttaatttttttgccttcataaa

SEQ ID NO: 125866 - DNA, 26 bp, Homo sapiens
aatttaatttttttgccttcataaat

SEQ ID NO: 125867 - DNA, 26 bp, Homo sapiens
atttaatttttttgccttcataaata

SEQ ID NO: 125868 - DNA, 26 bp, Homo sapiens
tttaatttttttgccttcataaatag

SEQ ID NO: 125869 - DNA, 26 bp, Homo sapiens
ttaatttttttgccttcataaatagt

SEQ ID NO: 125870 - DNA, 26 bp, Homo sapiens
taatttttttgccttcataaatagtc

SEQ ID NO: 125871 - DNA, 26 bp, Homo sapiens
aatttttttgccttcataaatagtcc

SEQ ID NO: 125872 - DNA, 26 bp, Homo sapiens
atttttttgccttcataaatagtccc

SEQ ID NO: 125873 - DNA, 26 bp, Homo sapiens
tttttttgccttcataaatagtcccc

SEQ ID NO: 125874 - DNA, 26 bp, Homo sapiens
ttttttgccttcataaatagtcccct

SEQ ID NO: 125875 - DNA, 26 bp, Homo sapiens
tttttgccttcataaatagtcccctc

SEQ ID NO: 125876 - DNA, 26 bp, Homo sapiens
ttttgccttcataaatagtcccctcc

SEQ ID NO: 125877 - DNA, 26 bp, Homo sapiens
tttgccttcataaatagtcccctccc

SEQ ID NO: 125878 - DNA, 26 bp, Homo sapiens
ttgccttcataaatagtcccctccct

SEQ ID NO: 125879 - DNA, 26 bp, Homo sapiens
tgccttcataaatagtcccctccctg

SEQ ID NO: 125880 - DNA, 26 bp, Homo sapiens
gccttcataaatagtcccctccctgc

SEQ ID NO: 125881 - DNA, 26 bp, Homo sapiens
ccttcataaatagtcccctccctgcc

SEQ ID NO: 125882 - DNA, 26 bp, Homo sapiens
cttcataaatagtcccctccctgcct

SEQ ID NO: 125883 - DNA, 26 bp, Homo sapiens
ttcataaatagtcccctccctgcctc

SEQ ID NO: 125884 - DNA, 26 bp, Homo sapiens
tcataaatagtcccctccctgcctct

SEQ ID NO: 125885 - DNA, 26 bp, Homo sapiens
cataaatagtcccctccctgcctcta

SEQ ID NO: 125886 - DNA, 26 bp, Homo sapiens
ataaatagtcccctccctgcctctag

SEQ ID NO: 125887 - DNA, 26 bp, Homo sapiens
taaatagtcccctccctgcctctagt

SEQ ID NO: 125888 - DNA, 26 bp, Homo sapiens
aaatagtcccctccctgcctctagtc

SEQ ID NO: 125889 - DNA, 26 bp, Homo sapiens
aatagtcccctccctgcctctagtca

SEQ ID NO: 125890 - DNA, 26 bp, Homo sapiens
atagtcccctccctgcctctagtcat

SEQ ID NO: 125891 - DNA, 26 bp, Homo sapiens
tagtcccctccctgcctctagtcatc

SEQ ID NO: 125892 - DNA, 26 bp, Homo sapiens
agtcccctccctgcctctagtcatcc

SEQ ID NO: 125893 - DNA, 26 bp, Homo sapiens
gtcccctccctgcctctagtcatccc

SEQ ID NO: 125894 - DNA, 26 bp, Homo sapiens
tcccctccctgcctctagtcatcccc

SEQ ID NO: 125895 - DNA, 26 bp, Homo sapiens
cccctccctgcctctagtcatccccc

SEQ ID NO: 125896 - DNA, 26 bp, Homo sapiens
ccctccctgcctctagtcatccccca

SEQ ID NO: 125897 - DNA, 26 bp, Homo sapiens
cctccctgcctctagtcatcccccaa

SEQ ID NO: 125898 - DNA, 26 bp, Homo sapiens
ctccctgcctctagtcatcccccaag

SEQ ID NO: 125899 - DNA, 26 bp, Homo sapiens
tccctgcctctagtcatcccccaagc

SEQ ID NO: 125900 - DNA, 26 bp, Homo sapiens
ccctgcctctagtcatcccccaagct

SEQ ID NO: 125901 - DNA, 26 bp, Homo sapiens
cctgcctctagtcatcccccaagctc

SEQ ID NO: 125902 - DNA, 26 bp, Homo sapiens
ctgcctctagtcatcccccaagctcc

SEQ ID NO: 125903 - DNA, 26 bp, Homo sapiens
tgcctctagtcatcccccaagctcct

SEQ ID NO: 125904 - DNA, 26 bp, Homo sapiens
gcctctagtcatcccccaagctcctc

SEQ ID NO: 125905 - DNA, 26 bp, Homo sapiens
cctctagtcatcccccaagctcctcc

SEQ ID NO: 125906 - DNA, 26 bp, Homo sapiens
ctctagtcatcccccaagctcctcca

SEQ ID NO: 125907 - DNA, 26 bp, Homo sapiens
tctagtcatcccccaagctcctccat

SEQ ID NO: 125908 - DNA, 26 bp, Homo sapiens
ctagtcatcccccaagctcctccatg

SEQ ID NO: 125909 - DNA, 26 bp, Homo sapiens
tagtcatcccccaagctcctccatgt

SEQ ID NO: 125910 - DNA, 26 bp, Homo sapiens
agtcatcccccaagctcctccatgtg

SEQ ID NO: 125911 - DNA, 26 bp, Homo sapiens
gtcatcccccaagctcctccatgtgc

SEQ ID NO: 125912 - DNA, 26 bp, Homo sapiens
tcatcccccaagctcctccatgtgcc

SEQ ID NO: 125913 - DNA, 26 bp, Homo sapiens
catcccccaagctcctccatgtgcct

SEQ ID NO: 125914 - DNA, 26 bp, Homo sapiens
atcccccaagctcctccatgtgcctg

SEQ ID NO: 125915 - DNA, 26 bp, Homo sapiens
tcccccaagctcctccatgtgcctgc

SEQ ID NO: 125916 - DNA, 26 bp, Homo sapiens
cccccaagctcctccatgtgcctgct

SEQ ID NO: 125917 - DNA, 26 bp, Homo sapiens
ccccaagctcctccatgtgcctgctc

SEQ ID NO: 125918 - DNA, 26 bp, Homo sapiens
cccaagctcctccatgtgcctgctct

SEQ ID NO: 125919 - DNA, 26 bp, Homo sapiens
ccaagctcctccatgtgcctgctctt

SEQ ID NO: 125920 - DNA, 26 bp, Homo sapiens
caagctcctccatgtgcctgctcttc

SEQ ID NO: 125921 - DNA, 26 bp, Homo sapiens
aagctcctccatgtgcctgctcttcc

SEQ ID NO: 125922 - DNA, 26 bp, Homo sapiens
agctcctccatgtgcctgctcttcct

SEQ ID NO: 125923 - DNA, 26 bp, Homo sapiens
gctcctccatgtgcctgctcttcctc

SEQ ID NO: 125924 - DNA, 26 bp, Homo sapiens
ctcctccatgtgcctgctcttcctct

SEQ ID NO: 125925 - DNA, 26 bp, Homo sapiens
tcctccatgtgcctgctcttcctctg

SEQ ID NO: 125926 - DNA, 26 bp, Homo sapiens
cctccatgtgcctgctcttcctctgt

SEQ ID NO: 125927 - DNA, 26 bp, Homo sapiens
ctccatgtgcctgctcttcctctgtg

SEQ ID NO: 125928 - DNA, 26 bp, Homo sapiens
tccatgtgcctgctcttcctctgtgt

SEQ ID NO: 125929 - DNA, 26 bp, Homo sapiens
ccatgtgcctgctcttcctctgtgtg

SEQ ID NO: 125930 - DNA, 26 bp, Homo sapiens
catgtgcctgctcttcctctgtgtgt

SEQ ID NO: 125931 - DNA, 26 bp, Homo sapiens
atgtgcctgctcttcctctgtgtgtg

SEQ ID NO: 125932 - DNA, 26 bp, Homo sapiens
tgtgcctgctcttcctctgtgtgtgg

SEQ ID NO: 125933 - DNA, 26 bp, Homo sapiens
gtgcctgctcttcctctgtgtgtgga

SEQ ID NO: 125934 - DNA, 26 bp, Homo sapiens
tgcctgctcttcctctgtgtgtggat

SEQ ID NO: 125935 - DNA, 26 bp, Homo sapiens
gcctgctcttcctctgtgtgtggatc

SEQ ID NO: 125936 - DNA, 26 bp, Homo sapiens
cctgctcttcctctgtgtgtggatct

SEQ ID NO: 125937 - DNA, 26 bp, Homo sapiens
ctgctcttcctctgtgtgtggatcta

SEQ ID NO: 125938 - DNA, 26 bp, Homo sapiens
tgctcttcctctgtgtgtggatctag

SEQ ID NO: 125939 - DNA, 26 bp, Homo sapiens
gctcttcctctgtgtgtggatctagg

SEQ ID NO: 125940 - DNA, 26 bp, Homo sapiens
ctcttcctctgtgtgtggatctaggc

SEQ ID NO: 125941 - DNA, 26 bp, Homo sapiens
tcttcctctgtgtgtggatctaggcc

SEQ ID NO: 125942 - DNA, 26 bp, Homo sapiens
cttcctctgtgtgtggatctaggccc

SEQ ID NO: 125943 - DNA, 26 bp, Homo sapiens
ttcctctgtgtgtggatctaggcccc

SEQ ID NO: 125944 - DNA, 26 bp, Homo sapiens
tcctctgtgtgtggatctaggcccca

SEQ ID NO: 125945 - DNA, 26 bp, Homo sapiens
cctctgtgtgtggatctaggccccac

SEQ ID NO: 125946 - DNA, 26 bp, Homo sapiens
ctctgtgtgtggatctaggccccacc

SEQ ID NO: 125947 - DNA, 26 bp, Homo sapiens
tctgtgtgtggatctaggccccacct

SEQ ID NO: 125948 - DNA, 26 bp, Homo sapiens
ctgtgtgtggatctaggccccaccta

SEQ ID NO: 125949 - DNA, 26 bp, Homo sapiens
tgtgtgtggatctaggccccacctag

SEQ ID NO: 125950 - DNA, 26 bp, Homo sapiens
gtgtgtggatctaggccccacctagc

SEQ ID NO: 125951 - DNA, 26 bp, Homo sapiens
tgtgtggatctaggccccacctagct

SEQ ID NO: 125952 - DNA, 26 bp, Homo sapiens
gtgtggatctaggccccacctagctg

SEQ ID NO: 125953 - DNA, 26 bp, Homo sapiens
tgtggatctaggccccacctagctgg

SEQ ID NO: 125954 - DNA, 26 bp, Homo sapiens
gtggatctaggccccacctagctggt

SEQ ID NO: 125955 - DNA, 26 bp, Homo sapiens
tggatctaggccccacctagctggtg

SEQ ID NO: 125956 - DNA, 26 bp, Homo sapiens
ggatctaggccccacctagctggtgg

SEQ ID NO: 125957 - DNA, 26 bp, Homo sapiens
gatctaggccccacctagctggtggg

SEQ ID NO: 125958 - DNA, 26 bp, Homo sapiens
atctaggccccacctagctggtggga

SEQ ID NO: 125959 - DNA, 26 bp, Homo sapiens
tctaggccccacctagctggtgggac

SEQ ID NO: 125960 - DNA, 26 bp, Homo sapiens
ctaggccccacctagctggtgggaca

SEQ ID NO: 125961 - DNA, 26 bp, Homo sapiens
taggccccacctagctggtgggacag

SEQ ID NO: 125962 - DNA, 26 bp, Homo sapiens
aggccccacctagctggtgggacaga

SEQ ID NO: 125963 - DNA, 26 bp, Homo sapiens
ggccccacctagctggtgggacagac

SEQ ID NO: 125964 - DNA, 26 bp, Homo sapiens
gccccacctagctggtgggacagacc

SEQ ID NO: 125965 - DNA, 26 bp, Homo sapiens
ccccacctagctggtgggacagacca

SEQ ID NO: 125966 - DNA, 26 bp, Homo sapiens
cccacctagctggtgggacagaccaa

SEQ ID NO: 125967 - DNA, 26 bp, Homo sapiens
ccacctagctggtgggacagaccaac

SEQ ID NO: 125968 - DNA, 26 bp, Homo sapiens
cacctagctggtgggacagaccaaca

SEQ ID NO: 125969 - DNA, 26 bp, Homo sapiens
acctagctggtgggacagaccaacag

SEQ ID NO: 125970 - DNA, 26 bp, Homo sapiens
cctagctggtgggacagaccaacagc

SEQ ID NO: 125971 - DNA, 26 bp, Homo sapiens
ctagctggtgggacagaccaacagct

SEQ ID NO: 125972 - DNA, 26 bp, Homo sapiens
tagctggtgggacagaccaacagctt

SEQ ID NO: 125973 - DNA, 26 bp, Homo sapiens
agctggtgggacagaccaacagcttt

SEQ ID NO: 125974 - DNA, 26 bp, Homo sapiens
gctggtgggacagaccaacagctttg

SEQ ID NO: 125975 - DNA, 26 bp, Homo sapiens
ctggtgggacagaccaacagctttgg

SEQ ID NO: 125976 - DNA, 26 bp, Homo sapiens
tggtgggacagaccaacagctttggg

SEQ ID NO: 125977 - DNA, 26 bp, Homo sapiens
ggtgggacagaccaacagctttgggc

SEQ ID NO: 125978 - DNA, 26 bp, Homo sapiens
gtgggacagaccaacagctttgggct

SEQ ID NO: 125979 - DNA, 26 bp, Homo sapiens
tgggacagaccaacagctttgggctg

SEQ ID NO: 125980 - DNA, 26 bp, Homo sapiens
gggacagaccaacagctttgggctgg

SEQ ID NO: 125981 - DNA, 26 bp, Homo sapiens
ggacagaccaacagctttgggctggg

SEQ ID NO: 125982 - DNA, 26 bp, Homo sapiens
gacagaccaacagctttgggctggga

SEQ ID NO: 125983 - DNA, 26 bp, Homo sapiens
acagaccaacagctttgggctgggaa

SEQ ID NO: 125984 - DNA, 26 bp, Homo sapiens
cagaccaacagctttgggctgggaat

SEQ ID NO: 125985 - DNA, 26 bp, Homo sapiens
agaccaacagctttgggctgggaatt

SEQ ID NO: 125986 - DNA, 26 bp, Homo sapiens
gaccaacagctttgggctgggaattc

SEQ ID NO: 125987 - DNA, 26 bp, Homo sapiens
accaacagctttgggctgggaattcc

SEQ ID NO: 125988 - DNA, 26 bp, Homo sapiens
ccaacagctttgggctgggaattcct

SEQ ID NO: 125989 - DNA, 26 bp, Homo sapiens
caacagctttgggctgggaattccta

SEQ ID NO: 125990 - DNA, 26 bp, Homo sapiens
aacagctttgggctgggaattcctag

SEQ ID NO: 125991 - DNA, 26 bp, Homo sapiens
acagctttgggctgggaattcctagg

SEQ ID NO: 125992 - DNA, 26 bp, Homo sapiens
cagctttgggctgggaattcctaggc

SEQ ID NO: 125993 - DNA, 26 bp, Homo sapiens
agctttgggctgggaattcctaggca

SEQ ID NO: 125994 - DNA, 26 bp, Homo sapiens
gctttgggctgggaattcctaggcag

SEQ ID NO: 125995 - DNA, 26 bp, Homo sapiens
ctttgggctgggaattcctaggcagg

SEQ ID NO: 125996 - DNA, 26 bp, Homo sapiens
tttgggctgggaattcctaggcaggc

SEQ ID NO: 125997 - DNA, 26 bp, Homo sapiens
ttgggctgggaattcctaggcaggct

SEQ ID NO: 125998 - DNA, 26 bp, Homo sapiens
tgggctgggaattcctaggcaggctt

SEQ ID NO: 125999 - DNA, 26 bp, Homo sapiens
gggctgggaattcctaggcaggcttg

SEQ ID NO: 126000 - DNA, 26 bp, Homo sapiens
ggctgggaattcctaggcaggcttga

SEQ ID NO: 126001 - DNA, 26 bp, Homo sapiens
gctgggaattcctaggcaggcttgaa

SEQ ID NO: 126002 - DNA, 26 bp, Homo sapiens
ctgggaattcctaggcaggcttgaaa

SEQ ID NO: 126003 - DNA, 26 bp, Homo sapiens
tgggaattcctaggcaggcttgaaat

SEQ ID NO: 126004 - DNA, 26 bp, Homo sapiens
gggaattcctaggcaggcttgaaatc

SEQ ID NO: 126005 - DNA, 26 bp, Homo sapiens
ggaattcctaggcaggcttgaaatcc

SEQ ID NO: 126006 - DNA, 26 bp, Homo sapiens
gaattcctaggcaggcttgaaatcct

SEQ ID NO: 126007 - DNA, 26 bp, Homo sapiens
aattcctaggcaggcttgaaatcctc

SEQ ID NO: 126008 - DNA, 26 bp, Homo sapiens
attcctaggcaggcttgaaatcctca

SEQ ID NO: 126009 - DNA, 26 bp, Homo sapiens
ttcctaggcaggcttgaaatcctcag

SEQ ID NO: 126010 - DNA, 26 bp, Homo sapiens
tcctaggcaggcttgaaatcctcagc

SEQ ID NO: 126011 - DNA, 26 bp, Homo sapiens
cctaggcaggcttgaaatcctcagcc

SEQ ID NO: 126012 - DNA, 26 bp, Homo sapiens
ctaggcaggcttgaaatcctcagcca

SEQ ID NO: 126013 - DNA, 26 bp, Homo sapiens
taggcaggcttgaaatcctcagccag

SEQ ID NO: 126014 - DNA, 26 bp, Homo sapiens
aggcaggcttgaaatcctcagccaga

SEQ ID NO: 126015 - DNA, 26 bp, Homo sapiens
ggcaggcttgaaatcctcagccagac

SEQ ID NO: 126016 - DNA, 26 bp, Homo sapiens
gcaggcttgaaatcctcagccagaca

SEQ ID NO: 126017 - DNA, 26 bp, Homo sapiens
caggcttgaaatcctcagccagacag

SEQ ID NO: 126018 - DNA, 26 bp, Homo sapiens
aggcttgaaatcctcagccagacaga

SEQ ID NO: 126019 - DNA, 26 bp, Homo sapiens
ggcttgaaatcctcagccagacagac

SEQ ID NO: 126020 - DNA, 26 bp, Homo sapiens
gcttgaaatcctcagccagacagaca

SEQ ID NO: 126021 - DNA, 26 bp, Homo sapiens
cttgaaatcctcagccagacagacat

SEQ ID NO: 126022 - DNA, 26 bp, Homo sapiens
ttgaaatcctcagccagacagacatc

SEQ ID NO: 126023 - DNA, 26 bp, Homo sapiens
tgaaatcctcagccagacagacatca

SEQ ID NO: 126024 - DNA, 26 bp, Homo sapiens
gaaatcctcagccagacagacatcag

SEQ ID NO: 126025 - DNA, 26 bp, Homo sapiens
aaatcctcagccagacagacatcagg

SEQ ID NO: 126026 - DNA, 26 bp, Homo sapiens
aatcctcagccagacagacatcaggg

SEQ ID NO: 126027 - DNA, 26 bp, Homo sapiens
atcctcagccagacagacatcaggga

SEQ ID NO: 126028 - DNA, 26 bp, Homo sapiens
tcctcagccagacagacatcagggat

SEQ ID NO: 126029 - DNA, 26 bp, Homo sapiens
cctcagccagacagacatcagggatg

SEQ ID NO: 126030 - DNA, 26 bp, Homo sapiens
ctcagccagacagacatcagggatgg

SEQ ID NO: 126031 - DNA, 26 bp, Homo sapiens
tcagccagacagacatcagggatggt

SEQ ID NO: 126032 - DNA, 26 bp, Homo sapiens
cagccagacagacatcagggatggtt

SEQ ID NO: 126033 - DNA, 26 bp, Homo sapiens
agccagacagacatcagggatggttc

SEQ ID NO: 126034 - DNA, 26 bp, Homo sapiens
gccagacagacatcagggatggttca

SEQ ID NO: 126035 - DNA, 26 bp, Homo sapiens
ccagacagacatcagggatggttcag

SEQ ID NO: 126036 - DNA, 26 bp, Homo sapiens
cagacagacatcagggatggttcagg

SEQ ID NO: 126037 - DNA, 26 bp, Homo sapiens
agacagacatcagggatggttcaggg

SEQ ID NO: 126038 - DNA, 26 bp, Homo sapiens
gacagacatcagggatggttcaggga

SEQ ID NO: 126039 - DNA, 26 bp, Homo sapiens
acagacatcagggatggttcagggag

SEQ ID NO: 126040 - DNA, 26 bp, Homo sapiens
cagacatcagggatggttcagggagg

SEQ ID NO: 126041 - DNA, 26 bp, Homo sapiens
agacatcagggatggttcagggaggt

SEQ ID NO: 126042 - DNA, 26 bp, Homo sapiens
gacatcagggatggttcagggaggtg

SEQ ID NO: 126043 - DNA, 26 bp, Homo sapiens
acatcagggatggttcagggaggtgt

SEQ ID NO: 126044 - DNA, 26 bp, Homo sapiens
catcagggatggttcagggaggtgtg

SEQ ID NO: 126045 - DNA, 26 bp, Homo sapiens
atcagggatggttcagggaggtgtgg

SEQ ID NO: 126046 - DNA, 26 bp, Homo sapiens
tcagggatggttcagggaggtgtggt

SEQ ID NO: 126047 - DNA, 26 bp, Homo sapiens
cagggatggttcagggaggtgtggtc

SEQ ID NO: 126048 - DNA, 26 bp, Homo sapiens
agggatggttcagggaggtgtggtcc

SEQ ID NO: 126049 - DNA, 26 bp, Homo sapiens
gggatggttcagggaggtgtggtccc

SEQ ID NO: 126050 - DNA, 26 bp, Homo sapiens
ggatggttcagggaggtgtggtcccc

SEQ ID NO: 126051 - DNA, 26 bp, Homo sapiens
gatggttcagggaggtgtggtcccct

SEQ ID NO: 126052 - DNA, 26 bp, Homo sapiens
atggttcagggaggtgtggtcccctg

SEQ ID NO: 126053 - DNA, 26 bp, Homo sapiens
tggttcagggaggtgtggtcccctgg

SEQ ID NO: 126054 - DNA, 26 bp, Homo sapiens
ggttcagggaggtgtggtcccctggg

SEQ ID NO: 126055 - DNA, 26 bp, Homo sapiens
gttcagggaggtgtggtcccctggga

SEQ ID NO: 126056 - DNA, 26 bp, Homo sapiens
ttcagggaggtgtggtcccctgggat

SEQ ID NO: 126057 - DNA, 26 bp, Homo sapiens
tcagggaggtgtggtcccctgggatg

SEQ ID NO: 126058 - DNA, 26 bp, Homo sapiens
cagggaggtgtggtcccctgggatgc

SEQ ID NO: 126059 - DNA, 26 bp, Homo sapiens
agggaggtgtggtcccctgggatgcc

SEQ ID NO: 126060 - DNA, 26 bp, Homo sapiens
gggaggtgtggtcccctgggatgcct

SEQ ID NO: 126061 - DNA, 26 bp, Homo sapiens
ggaggtgtggtcccctgggatgccta

SEQ ID NO: 126062 - DNA, 26 bp, Homo sapiens
gaggtgtggtcccctgggatgcctag

SEQ ID NO: 126063 - DNA, 26 bp, Homo sapiens
aggtgtggtcccctgggatgcctaga

SEQ ID NO: 126064 - DNA, 26 bp, Homo sapiens
ggtgtggtcccctgggatgcctagaa

SEQ ID NO: 126065 - DNA, 26 bp, Homo sapiens
gtgtggtcccctgggatgcctagaat

SEQ ID NO: 126066 - DNA, 26 bp, Homo sapiens
tgtggtcccctgggatgcctagaatt

SEQ ID NO: 126067 - DNA, 26 bp, Homo sapiens
gtggtcccctgggatgcctagaattc

SEQ ID NO: 126068 - DNA, 26 bp, Homo sapiens
tggtcccctgggatgcctagaattcc

SEQ ID NO: 126069 - DNA, 26 bp, Homo sapiens
ggtcccctgggatgcctagaattcct

SEQ ID NO: 126070 - DNA, 26 bp, Homo sapiens
gtcccctgggatgcctagaattcctt

SEQ ID NO: 126071 - DNA, 26 bp, Homo sapiens
tcccctgggatgcctagaattccttc

SEQ ID NO: 126072 - DNA, 26 bp, Homo sapiens
cccctgggatgcctagaattccttct

SEQ ID NO: 126073 - DNA, 26 bp, Homo sapiens
ccctgggatgcctagaattccttctt

SEQ ID NO: 126074 - DNA, 26 bp, Homo sapiens
cctgggatgcctagaattccttcttt

SEQ ID NO: 126075 - DNA, 26 bp, Homo sapiens
ctgggatgcctagaattccttctttg

SEQ ID NO: 126076 - DNA, 26 bp, Homo sapiens
tgggatgcctagaattccttctttga

SEQ ID NO: 126077 - DNA, 26 bp, Homo sapiens
gggatgcctagaattccttctttgaa

SEQ ID NO: 126078 - DNA, 26 bp, Homo sapiens
ggatgcctagaattccttctttgaaa

SEQ ID NO: 126079 - DNA, 26 bp, Homo sapiens
gatgcctagaattccttctttgaaag

SEQ ID NO: 126080 - DNA, 26 bp, Homo sapiens
atgcctagaattccttctttgaaagc

SEQ ID NO: 126081 - DNA, 26 bp, Homo sapiens
tgcctagaattccttctttgaaagct

SEQ ID NO: 126082 - DNA, 26 bp, Homo sapiens
gcctagaattccttctttgaaagctc

SEQ ID NO: 126083 - DNA, 26 bp, Homo sapiens
cctagaattccttctttgaaagctcc

SEQ ID NO: 126084 - DNA, 26 bp, Homo sapiens
ctagaattccttctttgaaagctccg

SEQ ID NO: 126085 - DNA, 26 bp, Homo sapiens
tagaattccttctttgaaagctccgg

SEQ ID NO: 126086 - DNA, 26 bp, Homo sapiens
agaattccttctttgaaagctccggt

SEQ ID NO: 126087 - DNA, 26 bp, Homo sapiens
gaattccttctttgaaagctccggtg

SEQ ID NO: 126088 - DNA, 26 bp, Homo sapiens
aattccttctttgaaagctccggtga

SEQ ID NO: 126089 - DNA, 26 bp, Homo sapiens
attccttctttgaaagctccggtgac

SEQ ID NO: 126090 - DNA, 26 bp, Homo sapiens
ttccttctttgaaagctccggtgact

SEQ ID NO: 126091 - DNA, 26 bp, Homo sapiens
tccttctttgaaagctccggtgactt

SEQ ID NO: 126092 - DNA, 26 bp, Homo sapiens
ccttctttgaaagctccggtgacttg

SEQ ID NO: 126093 - DNA, 26 bp, Homo sapiens
cttctttgaaagctccggtgacttga

SEQ ID NO: 126094 - DNA, 26 bp, Homo sapiens
ttctttgaaagctccggtgacttgat

SEQ ID NO: 126095 - DNA, 26 bp, Homo sapiens
tctttgaaagctccggtgacttgatc

SEQ ID NO: 126096 - DNA, 26 bp, Homo sapiens
ctttgaaagctccggtgacttgatca

SEQ ID NO: 126097 - DNA, 26 bp, Homo sapiens
tttgaaagctccggtgacttgatcag

SEQ ID NO: 126098 - DNA, 26 bp, Homo sapiens
ttgaaagctccggtgacttgatcagg

SEQ ID NO: 126099 - DNA, 26 bp, Homo sapiens
tgaaagctccggtgacttgatcaggg

SEQ ID NO: 126100 - DNA, 26 bp, Homo sapiens
gaaagctccggtgacttgatcaggga

SEQ ID NO: 126101 - DNA, 26 bp, Homo sapiens
aaagctccggtgacttgatcagggaa

SEQ ID NO: 126102 - DNA, 26 bp, Homo sapiens
aagctccggtgacttgatcagggaag

SEQ ID NO: 126103 - DNA, 26 bp, Homo sapiens
agctccggtgacttgatcagggaaga

SEQ ID NO: 126104 - DNA, 26 bp, Homo sapiens
gctccggtgacttgatcagggaagac

SEQ ID NO: 126105 - DNA, 26 bp, Homo sapiens
ctccggtgacttgatcagggaagact

SEQ ID NO: 126106 - DNA, 26 bp, Homo sapiens
tccggtgacttgatcagggaagactt

SEQ ID NO: 126107 - DNA, 26 bp, Homo sapiens
ccggtgacttgatcagggaagacttg

SEQ ID NO: 126108 - DNA, 26 bp, Homo sapiens
cggtgacttgatcagggaagacttga

SEQ ID NO: 126109 - DNA, 26 bp, Homo sapiens
ggtgacttgatcagggaagacttgag

SEQ ID NO: 126110 - DNA, 26 bp, Homo sapiens
gtgacttgatcagggaagacttgagc

SEQ ID NO: 126111 - DNA, 26 bp, Homo sapiens
tgacttgatcagggaagacttgagct

SEQ ID NO: 126112 - DNA, 26 bp, Homo sapiens
gacttgatcagggaagacttgagctg

SEQ ID NO: 126113 - DNA, 26 bp, Homo sapiens
acttgatcagggaagacttgagctgt

SEQ ID NO: 126114 - DNA, 26 bp, Homo sapiens
cttgatcagggaagacttgagctgtt

SEQ ID NO: 126115 - DNA, 26 bp, Homo sapiens
ttgatcagggaagacttgagctgttg

SEQ ID NO: 126116 - DNA, 26 bp, Homo sapiens
tgatcagggaagacttgagctgttgg

SEQ ID NO: 126117 - DNA, 26 bp, Homo sapiens
gatcagggaagacttgagctgttgga

SEQ ID NO: 126118 - DNA, 26 bp, Homo sapiens
atcagggaagacttgagctgttggaa

SEQ ID NO: 126119 - DNA, 26 bp, Homo sapiens
tcagggaagacttgagctgttggaat

SEQ ID NO: 126120 - DNA, 26 bp, Homo sapiens
cagggaagacttgagctgttggaatg

SEQ ID NO: 126121 - DNA, 26 bp, Homo sapiens
agggaagacttgagctgttggaatgg

SEQ ID NO: 126122 - DNA, 26 bp, Homo sapiens
gggaagacttgagctgttggaatggc

SEQ ID NO: 126123 - DNA, 26 bp, Homo sapiens
ggaagacttgagctgttggaatggcc

SEQ ID NO: 126124 - DNA, 26 bp, Homo sapiens
gaagacttgagctgttggaatggcca

SEQ ID NO: 126125 - DNA, 26 bp, Homo sapiens
aagacttgagctgttggaatggccaa

SEQ ID NO: 126126 - DNA, 26 bp, Homo sapiens
agacttgagctgttggaatggccaaa

SEQ ID NO: 126127 - DNA, 26 bp, Homo sapiens
gacttgagctgttggaatggccaaag

SEQ ID NO: 126128 - DNA, 26 bp, Homo sapiens
acttgagctgttggaatggccaaagg

SEQ ID NO: 126129 - DNA, 26 bp, Homo sapiens
cttgagctgttggaatggccaaagga

SEQ ID NO: 126130 - DNA, 26 bp, Homo sapiens
ttgagctgttggaatggccaaaggag

SEQ ID NO: 126131 - DNA, 26 bp, Homo sapiens
tgagctgttggaatggccaaaggaga

SEQ ID NO: 126132 - DNA, 26 bp, Homo sapiens
gagctgttggaatggccaaaggagag

SEQ ID NO: 126133 - DNA, 26 bp, Homo sapiens
agctgttggaatggccaaaggagagg

SEQ ID NO: 126134 - DNA, 26 bp, Homo sapiens
gctgttggaatggccaaaggagaggt

SEQ ID NO: 126135 - DNA, 26 bp, Homo sapiens
ctgttggaatggccaaaggagaggtg

SEQ ID NO: 126136 - DNA, 26 bp, Homo sapiens
tgttggaatggccaaaggagaggtgg

SEQ ID NO: 126137 - DNA, 26 bp, Homo sapiens
gttggaatggccaaaggagaggtggt

SEQ ID NO: 126138 - DNA, 26 bp, Homo sapiens
ttggaatggccaaaggagaggtggtg

SEQ ID NO: 126139 - DNA, 26 bp, Homo sapiens
tggaatggccaaaggagaggtggtga

SEQ ID NO: 126140 - DNA, 26 bp, Homo sapiens
ggaatggccaaaggagaggtggtgac

SEQ ID NO: 126141 - DNA, 26 bp, Homo sapiens
gaatggccaaaggagaggtggtgacg

SEQ ID NO: 126142 - DNA, 26 bp, Homo sapiens
aatggccaaaggagaggtggtgacga

SEQ ID NO: 126143 - DNA, 26 bp, Homo sapiens
atggccaaaggagaggtggtgacgac

SEQ ID NO: 126144 - DNA, 26 bp, Homo sapiens
tggccaaaggagaggtggtgacgacc

SEQ ID NO: 126145 - DNA, 26 bp, Homo sapiens
ggccaaaggagaggtggtgacgaccc

SEQ ID NO: 126146 - DNA, 26 bp, Homo sapiens
gccaaaggagaggtggtgacgacccc

SEQ ID NO: 126147 - DNA, 26 bp, Homo sapiens
ccaaaggagaggtggtgacgacccct

SEQ ID NO: 126148 - DNA, 26 bp, Homo sapiens
caaaggagaggtggtgacgacccctg

SEQ ID NO: 126149 - DNA, 26 bp, Homo sapiens
aaaggagaggtggtgacgacccctga

SEQ ID NO: 126150 - DNA, 26 bp, Homo sapiens
aaggagaggtggtgacgacccctgaa

SEQ ID NO: 126151 - DNA, 26 bp, Homo sapiens
aggagaggtggtgacgacccctgaaa

SEQ ID NO: 126152 - DNA, 26 bp, Homo sapiens
ggagaggtggtgacgacccctgaaat

SEQ ID NO: 126153 - DNA, 26 bp, Homo sapiens
gagaggtggtgacgacccctgaaatg

SEQ ID NO: 126154 - DNA, 26 bp, Homo sapiens
agaggtggtgacgacccctgaaatgg

SEQ ID NO: 126155 - DNA, 26 bp, Homo sapiens
gaggtggtgacgacccctgaaatggt

SEQ ID NO: 126156 - DNA, 26 bp, Homo sapiens
aggtggtgacgacccctgaaatggtc

SEQ ID NO: 126157 - DNA, 26 bp, Homo sapiens
ggtggtgacgacccctgaaatggtca

SEQ ID NO: 126158 - DNA, 26 bp, Homo sapiens
gtggtgacgacccctgaaatggtcag

SEQ ID NO: 126159 - DNA, 26 bp, Homo sapiens
tggtgacgacccctgaaatggtcaga

SEQ ID NO: 126160 - DNA, 26 bp, Homo sapiens
ggtgacgacccctgaaatggtcagaa

SEQ ID NO: 126161 - DNA, 26 bp, Homo sapiens
gtgacgacccctgaaatggtcagaat

SEQ ID NO: 126162 - DNA, 26 bp, Homo sapiens
tgacgacccctgaaatggtcagaatg

SEQ ID NO: 126163 - DNA, 26 bp, Homo sapiens
gacgacccctgaaatggtcagaatgg

SEQ ID NO: 126164 - DNA, 26 bp, Homo sapiens
acgacccctgaaatggtcagaatgga

SEQ ID NO: 126165 - DNA, 26 bp, Homo sapiens
cgacccctgaaatggtcagaatggag

SEQ ID NO: 126166 - DNA, 26 bp, Homo sapiens
gacccctgaaatggtcagaatggagg

SEQ ID NO: 126167 - DNA, 26 bp, Homo sapiens
acccctgaaatggtcagaatggaggc

SEQ ID NO: 126168 - DNA, 26 bp, Homo sapiens
cccctgaaatggtcagaatggaggca

SEQ ID NO: 126169 - DNA, 26 bp, Homo sapiens
ccctgaaatggtcagaatggaggcag

SEQ ID NO: 126170 - DNA, 26 bp, Homo sapiens
cctgaaatggtcagaatggaggcaga

SEQ ID NO: 126171 - DNA, 26 bp, Homo sapiens
ctgaaatggtcagaatggaggcagaa

SEQ ID NO: 126172 - DNA, 26 bp, Homo sapiens
tgaaatggtcagaatggaggcagaat

SEQ ID NO: 126173 - DNA, 26 bp, Homo sapiens
gaaatggtcagaatggaggcagaatg

SEQ ID NO: 126174 - DNA, 26 bp, Homo sapiens
aaatggtcagaatggaggcagaatgg

SEQ ID NO: 126175 - DNA, 26 bp, Homo sapiens
aatggtcagaatggaggcagaatggg

SEQ ID NO: 126176 - DNA, 26 bp, Homo sapiens
atggtcagaatggaggcagaatgggg

SEQ ID NO: 126177 - DNA, 26 bp, Homo sapiens
tggtcagaatggaggcagaatgggga

SEQ ID NO: 126178 - DNA, 26 bp, Homo sapiens
ggtcagaatggaggcagaatggggag

SEQ ID NO: 126179 - DNA, 26 bp, Homo sapiens
gtcagaatggaggcagaatggggaga

SEQ ID NO: 126180 - DNA, 26 bp, Homo sapiens
tcagaatggaggcagaatggggagaa

SEQ ID NO: 126181 - DNA, 26 bp, Homo sapiens
cagaatggaggcagaatggggagaag

SEQ ID NO: 126182 - DNA, 26 bp, Homo sapiens
agaatggaggcagaatggggagaagg

SEQ ID NO: 126183 - DNA, 26 bp, Homo sapiens
gaatggaggcagaatggggagaaggt

SEQ ID NO: 126184 - DNA, 26 bp, Homo sapiens
aatggaggcagaatggggagaaggtc

SEQ ID NO: 126185 - DNA, 26 bp, Homo sapiens
atggaggcagaatggggagaaggtct

SEQ ID NO: 126186 - DNA, 26 bp, Homo sapiens
tggaggcagaatggggagaaggtctt

SEQ ID NO: 126187 - DNA, 26 bp, Homo sapiens
ggaggcagaatggggagaaggtcttg

SEQ ID NO: 126188 - DNA, 26 bp, Homo sapiens
gaggcagaatggggagaaggtcttga

SEQ ID NO: 126189 - DNA, 26 bp, Homo sapiens
aggcagaatggggagaaggtcttgaa

SEQ ID NO: 126190 - DNA, 26 bp, Homo sapiens
ggcagaatggggagaaggtcttgaaa

SEQ ID NO: 126191 - DNA, 26 bp, Homo sapiens
gcagaatggggagaaggtcttgaaat

SEQ ID NO: 126192 - DNA, 26 bp, Homo sapiens
cagaatggggagaaggtcttgaaatc

SEQ ID NO: 126193 - DNA, 26 bp, Homo sapiens
agaatggggagaaggtcttgaaatca

SEQ ID NO: 126194 - DNA, 26 bp, Homo sapiens
gaatggggagaaggtcttgaaatcaa

SEQ ID NO: 126195 - DNA, 26 bp, Homo sapiens
aatggggagaaggtcttgaaatcaat

SEQ ID NO: 126196 - DNA, 26 bp, Homo sapiens
atggggagaaggtcttgaaatcaatt

SEQ ID NO: 126197 - DNA, 26 bp, Homo sapiens
tggggagaaggtcttgaaatcaatta

SEQ ID NO: 126198 - DNA, 26 bp, Homo sapiens
ggggagaaggtcttgaaatcaattat

SEQ ID NO: 126199 - DNA, 26 bp, Homo sapiens
gggagaaggtcttgaaatcaattatt

SEQ ID NO: 126200 - DNA, 26 bp, Homo sapiens
ggagaaggtcttgaaatcaattattt

SEQ ID NO: 126201 - DNA, 26 bp, Homo sapiens
gagaaggtcttgaaatcaattatttt

SEQ ID NO: 126202 - DNA, 26 bp, Homo sapiens
agaaggtcttgaaatcaattattttt

SEQ ID NO: 126203 - DNA, 26 bp, Homo sapiens
gaaggtcttgaaatcaattatttttt

SEQ ID NO: 126204 - DNA, 26 bp, Homo sapiens
aaggtcttgaaatcaattattttttc

SEQ ID NO: 126205 - DNA, 26 bp, Homo sapiens
aggtcttgaaatcaattattttttct

SEQ ID NO: 126206 - DNA, 26 bp, Homo sapiens
ggtcttgaaatcaattattttttctt

SEQ ID NO: 126207 - DNA, 26 bp, Homo sapiens
gtcttgaaatcaattattttttcttt

SEQ ID NO: 126208 - DNA, 26 bp, Homo sapiens
tcttgaaatcaattattttttctttc

SEQ ID NO: 126209 - DNA, 26 bp, Homo sapiens
cttgaaatcaattattttttctttct

SEQ ID NO: 126210 - DNA, 26 bp, Homo sapiens
ttgaaatcaattattttttctttctg

SEQ ID NO: 126211 - DNA, 26 bp, Homo sapiens
tgaaatcaattattttttctttctgg

SEQ ID NO: 126212 - DNA, 26 bp, Homo sapiens
gaaatcaattattttttctttctgga

SEQ ID NO: 126213 - DNA, 26 bp, Homo sapiens
aaatcaattattttttctttctggat

SEQ ID NO: 126214 - DNA, 26 bp, Homo sapiens
aatcaattattttttctttctggatt

SEQ ID NO: 126215 - DNA, 26 bp, Homo sapiens
atcaattattttttctttctggattt

SEQ ID NO: 126216 - DNA, 26 bp, Homo sapiens
tcaattattttttctttctggatttt

SEQ ID NO: 126217 - DNA, 26 bp, Homo sapiens
caattattttttctttctggattttt

SEQ ID NO: 126218 - DNA, 26 bp, Homo sapiens
aattattttttctttctggatttttc

SEQ ID NO: 126219 - DNA, 26 bp, Homo sapiens
attattttttctttctggatttttcc

SEQ ID NO: 126220 - DNA, 26 bp, Homo sapiens
ttattttttctttctggatttttcca

SEQ ID NO: 126221 - DNA, 26 bp, Homo sapiens
tattttttctttctggatttttccaa

SEQ ID NO: 126222 - DNA, 26 bp, Homo sapiens
attttttctttctggatttttccaag

SEQ ID NO: 126223 - DNA, 26 bp, Homo sapiens
ttttttctttctggatttttccaagt

SEQ ID NO: 126224 - DNA, 26 bp, Homo sapiens
tttttctttctggatttttccaagtt

SEQ ID NO: 126225 - DNA, 26 bp, Homo sapiens
ttttctttctggatttttccaagttc

SEQ ID NO: 126226 - DNA, 26 bp, Homo sapiens
tttctttctggatttttccaagttct

SEQ ID NO: 126227 - DNA, 26 bp, Homo sapiens
ttctttctggatttttccaagttcta

SEQ ID NO: 126228 - DNA, 26 bp, Homo sapiens
tctttctggatttttccaagttctac

SEQ ID NO: 126229 - DNA, 26 bp, Homo sapiens
ctttctggatttttccaagttctaca

SEQ ID NO: 126230 - DNA, 26 bp, Homo sapiens
tttctggatttttccaagttctacag

SEQ ID NO: 126231 - DNA, 26 bp, Homo sapiens
ttctggatttttccaagttctacaga

SEQ ID NO: 126232 - DNA, 26 bp, Homo sapiens
tctggatttttccaagttctacagag

SEQ ID NO: 126233 - DNA, 26 bp, Homo sapiens
ctggatttttccaagttctacagagc

SEQ ID NO: 126234 - DNA, 26 bp, Homo sapiens
tggatttttccaagttctacagagcg

SEQ ID NO: 126235 - DNA, 26 bp, Homo sapiens
ggatttttccaagttctacagagcga

SEQ ID NO: 126236 - DNA, 26 bp, Homo sapiens
gatttttccaagttctacagagcgaa

SEQ ID NO: 126237 - DNA, 26 bp, Homo sapiens
atttttccaagttctacagagcgaag

SEQ ID NO: 126238 - DNA, 26 bp, Homo sapiens
tttttccaagttctacagagcgaagg

SEQ ID NO: 126239 - DNA, 26 bp, Homo sapiens
ttttccaagttctacagagcgaaggc

SEQ ID NO: 126240 - DNA, 26 bp, Homo sapiens
tttccaagttctacagagcgaaggct

SEQ ID NO: 126241 - DNA, 26 bp, Homo sapiens
ttccaagttctacagagcgaaggctc

SEQ ID NO: 126242 - DNA, 26 bp, Homo sapiens
tccaagttctacagagcgaaggctcc

SEQ ID NO: 126243 - DNA, 26 bp, Homo sapiens
ccaagttctacagagcgaaggctcca

SEQ ID NO: 126244 - DNA, 26 bp, Homo sapiens
caagttctacagagcgaaggctccaa

SEQ ID NO: 126245 - DNA, 26 bp, Homo sapiens
aagttctacagagcgaaggctccaaa

SEQ ID NO: 126246 - DNA, 26 bp, Homo sapiens
agttctacagagcgaaggctccaaag

SEQ ID NO: 126247 - DNA, 26 bp, Homo sapiens
gttctacagagcgaaggctccaaaga

SEQ ID NO: 126248 - DNA, 26 bp, Homo sapiens
ttctacagagcgaaggctccaaagaa

SEQ ID NO: 126249 - DNA, 26 bp, Homo sapiens
tctacagagcgaaggctccaaagaag

SEQ ID NO: 126250 - DNA, 26 bp, Homo sapiens
ctacagagcgaaggctccaaagaaga

SEQ ID NO: 126251 - DNA, 26 bp, Homo sapiens
tacagagcgaaggctccaaagaagac

SEQ ID NO: 126252 - DNA, 26 bp, Homo sapiens
acagagcgaaggctccaaagaagaca

SEQ ID NO: 126253 - DNA, 26 bp, Homo sapiens
cagagcgaaggctccaaagaagacag

SEQ ID NO: 126254 - DNA, 26 bp, Homo sapiens
agagcgaaggctccaaagaagacagt

SEQ ID NO: 126255 - DNA, 26 bp, Homo sapiens
gagcgaaggctccaaagaagacagta

SEQ ID NO: 126256 - DNA, 26 bp, Homo sapiens
agcgaaggctccaaagaagacagtac

SEQ ID NO: 126257 - DNA, 26 bp, Homo sapiens
gcgaaggctccaaagaagacagtact

SEQ ID NO: 126258 - DNA, 26 bp, Homo sapiens
cgaaggctccaaagaagacagtacta

SEQ ID NO: 126259 - DNA, 26 bp, Homo sapiens
gaaggctccaaagaagacagtactag

SEQ ID NO: 126260 - DNA, 26 bp, Homo sapiens
aaggctccaaagaagacagtactagg

SEQ ID NO: 126261 - DNA, 26 bp, Homo sapiens
aggctccaaagaagacagtactaggg

SEQ ID NO: 126262 - DNA, 26 bp, Homo sapiens
ggctccaaagaagacagtactagggc

SEQ ID NO: 126263 - DNA, 26 bp, Homo sapiens
gctccaaagaagacagtactagggct

SEQ ID NO: 126264 - DNA, 26 bp, Homo sapiens
ctccaaagaagacagtactagggctg

SEQ ID NO: 126265 - DNA, 26 bp, Homo sapiens
tccaaagaagacagtactagggctga

SEQ ID NO: 126266 - DNA, 26 bp, Homo sapiens
ccaaagaagacagtactagggctgag

SEQ ID NO: 126267 - DNA, 26 bp, Homo sapiens
caaagaagacagtactagggctgagg

SEQ ID NO: 126268 - DNA, 26 bp, Homo sapiens
aaagaagacagtactagggctgagga

SEQ ID NO: 126269 - DNA, 26 bp, Homo sapiens
aagaagacagtactagggctgaggac

SEQ ID NO: 126270 - DNA, 26 bp, Homo sapiens
agaagacagtactagggctgaggact

SEQ ID NO: 126271 - DNA, 26 bp, Homo sapiens
gaagacagtactagggctgaggacta

SEQ ID NO: 126272 - DNA, 26 bp, Homo sapiens
aagacagtactagggctgaggactag

SEQ ID NO: 126273 - DNA, 26 bp, Homo sapiens
agacagtactagggctgaggactagg

SEQ ID NO: 126274 - DNA, 26 bp, Homo sapiens
gacagtactagggctgaggactaggt

SEQ ID NO: 126275 - DNA, 26 bp, Homo sapiens
acagtactagggctgaggactaggtg

SEQ ID NO: 126276 - DNA, 26 bp, Homo sapiens
cagtactagggctgaggactaggtgg

SEQ ID NO: 126277 - DNA, 26 bp, Homo sapiens
agtactagggctgaggactaggtggg

SEQ ID NO: 126278 - DNA, 26 bp, Homo sapiens
gtactagggctgaggactaggtgggg

SEQ ID NO: 126279 - DNA, 26 bp, Homo sapiens
tactagggctgaggactaggtggggg

SEQ ID NO: 126280 - DNA, 26 bp, Homo sapiens
actagggctgaggactaggtggggga

SEQ ID NO: 126281 - DNA, 26 bp, Homo sapiens
ctagggctgaggactaggtgggggat

SEQ ID NO: 126282 - DNA, 26 bp, Homo sapiens
tagggctgaggactaggtgggggatg

SEQ ID NO: 126283 - DNA, 26 bp, Homo sapiens
agggctgaggactaggtgggggatgc

SEQ ID NO: 126284 - DNA, 26 bp, Homo sapiens
gggctgaggactaggtgggggatgcc

SEQ ID NO: 126285 - DNA, 26 bp, Homo sapiens
ggctgaggactaggtgggggatgcca

SEQ ID NO: 126286 - DNA, 26 bp, Homo sapiens
gctgaggactaggtgggggatgccat

SEQ ID NO: 126287 - DNA, 26 bp, Homo sapiens
ctgaggactaggtgggggatgccatc

SEQ ID NO: 126288 - DNA, 26 bp, Homo sapiens
tgaggactaggtgggggatgccatct

SEQ ID NO: 126289 - DNA, 26 bp, Homo sapiens
gaggactaggtgggggatgccatctg

SEQ ID NO: 126290 - DNA, 26 bp, Homo sapiens
aggactaggtgggggatgccatctgt

SEQ ID NO: 126291 - DNA, 26 bp, Homo sapiens
ggactaggtgggggatgccatctgtg

SEQ ID NO: 126292 - DNA, 26 bp, Homo sapiens
gactaggtgggggatgccatctgtgt

SEQ ID NO: 126293 - DNA, 26 bp, Homo sapiens
actaggtgggggatgccatctgtgtg

SEQ ID NO: 126294 - DNA, 26 bp, Homo sapiens
ctaggtgggggatgccatctgtgtgg

SEQ ID NO: 126295 - DNA, 26 bp, Homo sapiens
taggtgggggatgccatctgtgtggg

SEQ ID NO: 126296 - DNA, 26 bp, Homo sapiens
aggtgggggatgccatctgtgtgggt

SEQ ID NO: 126297 - DNA, 26 bp, Homo sapiens
ggtgggggatgccatctgtgtgggtg

SEQ ID NO: 126298 - DNA, 26 bp, Homo sapiens
gtgggggatgccatctgtgtgggtgg

SEQ ID NO: 126299 - DNA, 26 bp, Homo sapiens
tgggggatgccatctgtgtgggtgga

SEQ ID NO: 126300 - DNA, 26 bp, Homo sapiens
gggggatgccatctgtgtgggtggat

SEQ ID NO: 126301 - DNA, 26 bp, Homo sapiens
ggggatgccatctgtgtgggtggata

SEQ ID NO: 126302 - DNA, 26 bp, Homo sapiens
gggatgccatctgtgtgggtggatag

SEQ ID NO: 126303 - DNA, 26 bp, Homo sapiens
ggatgccatctgtgtgggtggatagc

SEQ ID NO: 126304 - DNA, 26 bp, Homo sapiens
gatgccatctgtgtgggtggatagct

SEQ ID NO: 126305 - DNA, 26 bp, Homo sapiens
atgccatctgtgtgggtggatagctg

SEQ ID NO: 126306 - DNA, 26 bp, Homo sapiens
tgccatctgtgtgggtggatagctgg

SEQ ID NO: 126307 - DNA, 26 bp, Homo sapiens
gccatctgtgtgggtggatagctggt

SEQ ID NO: 126308 - DNA, 26 bp, Homo sapiens
ccatctgtgtgggtggatagctggtc

SEQ ID NO: 126309 - DNA, 26 bp, Homo sapiens
catctgtgtgggtggatagctggtct

SEQ ID NO: 126310 - DNA, 26 bp, Homo sapiens
atctgtgtgggtggatagctggtctc

SEQ ID NO: 126311 - DNA, 26 bp, Homo sapiens
tctgtgtgggtggatagctggtctcc

SEQ ID NO: 126312 - DNA, 26 bp, Homo sapiens
ctgtgtgggtggatagctggtctccc

SEQ ID NO: 126313 - DNA, 26 bp, Homo sapiens
tgtgtgggtggatagctggtctccct

SEQ ID NO: 126314 - DNA, 26 bp, Homo sapiens
gtgtgggtggatagctggtctccctg

SEQ ID NO: 126315 - DNA, 26 bp, Homo sapiens
tgtgggtggatagctggtctccctgg

SEQ ID NO: 126316 - DNA, 26 bp, Homo sapiens
gtgggtggatagctggtctccctggg

SEQ ID NO: 126317 - DNA, 26 bp, Homo sapiens
tgggtggatagctggtctccctgggt

SEQ ID NO: 126318 - DNA, 26 bp, Homo sapiens
gggtggatagctggtctccctgggtg

SEQ ID NO: 126319 - DNA, 26 bp, Homo sapiens
ggtggatagctggtctccctgggtga

SEQ ID NO: 126320 - DNA, 26 bp, Homo sapiens
gtggatagctggtctccctgggtgag

SEQ ID NO: 126321 - DNA, 26 bp, Homo sapiens
tggatagctggtctccctgggtgagc

SEQ ID NO: 126322 - DNA, 26 bp, Homo sapiens
ggatagctggtctccctgggtgagct

SEQ ID NO: 126323 - DNA, 26 bp, Homo sapiens
gatagctggtctccctgggtgagctg

SEQ ID NO: 126324 - DNA, 26 bp, Homo sapiens
atagctggtctccctgggtgagctgg

SEQ ID NO: 126325 - DNA, 26 bp, Homo sapiens
tagctggtctccctgggtgagctgga

SEQ ID NO: 126326 - DNA, 26 bp, Homo sapiens
agctggtctccctgggtgagctggaa

SEQ ID NO: 126327 - DNA, 26 bp, Homo sapiens
gctggtctccctgggtgagctggaac

SEQ ID NO: 126328 - DNA, 26 bp, Homo sapiens
ctggtctccctgggtgagctggaacg

SEQ ID NO: 126329 - DNA, 26 bp, Homo sapiens
tggtctccctgggtgagctggaacgc

SEQ ID NO: 126330 - DNA, 26 bp, Homo sapiens
ggtctccctgggtgagctggaacgca

SEQ ID NO: 126331 - DNA, 26 bp, Homo sapiens
gtctccctgggtgagctggaacgcag

SEQ ID NO: 126332 - DNA, 26 bp, Homo sapiens
tctccctgggtgagctggaacgcagc

SEQ ID NO: 126333 - DNA, 26 bp, Homo sapiens
ctccctgggtgagctggaacgcagcc

SEQ ID NO: 126334 - DNA, 26 bp, Homo sapiens
tccctgggtgagctggaacgcagccc

SEQ ID NO: 126335 - DNA, 26 bp, Homo sapiens
ccctgggtgagctggaacgcagcccc

SEQ ID NO: 126336 - DNA, 26 bp, Homo sapiens
cctgggtgagctggaacgcagccccg

SEQ ID NO: 126337 - DNA, 26 bp, Homo sapiens
ctgggtgagctggaacgcagccccgt

SEQ ID NO: 126338 - DNA, 26 bp, Homo sapiens
tgggtgagctggaacgcagccccgtg

SEQ ID NO: 126339 - DNA, 26 bp, Homo sapiens
gggtgagctggaacgcagccccgtgg

SEQ ID NO: 126340 - DNA, 26 bp, Homo sapiens
ggtgagctggaacgcagccccgtggt

SEQ ID NO: 126341 - DNA, 26 bp, Homo sapiens
gtgagctggaacgcagccccgtggta

SEQ ID NO: 126342 - DNA, 26 bp, Homo sapiens
tgagctggaacgcagccccgtggtac

SEQ ID NO: 126343 - DNA, 26 bp, Homo sapiens
gagctggaacgcagccccgtggtaca

SEQ ID NO: 126344 - DNA, 26 bp, Homo sapiens
agctggaacgcagccccgtggtacat

SEQ ID NO: 126345 - DNA, 26 bp, Homo sapiens
gctggaacgcagccccgtggtacatc

SEQ ID NO: 126346 - DNA, 26 bp, Homo sapiens
ctggaacgcagccccgtggtacatcg

SEQ ID NO: 126347 - DNA, 26 bp, Homo sapiens
tggaacgcagccccgtggtacatcga

SEQ ID NO: 126348 - DNA, 26 bp, Homo sapiens
ggaacgcagccccgtggtacatcgag

SEQ ID NO: 126349 - DNA, 26 bp, Homo sapiens
gaacgcagccccgtggtacatcgagt

SEQ ID NO: 126350 - DNA, 26 bp, Homo sapiens
aacgcagccccgtggtacatcgagtg

SEQ ID NO: 126351 - DNA, 26 bp, Homo sapiens
acgcagccccgtggtacatcgagtgc

SEQ ID NO: 126352 - DNA, 26 bp, Homo sapiens
cgcagccccgtggtacatcgagtgca

SEQ ID NO: 126353 - DNA, 26 bp, Homo sapiens
gcagccccgtggtacatcgagtgcag

SEQ ID NO: 126354 - DNA, 26 bp, Homo sapiens
cagccccgtggtacatcgagtgcagc

SEQ ID NO: 126355 - DNA, 26 bp, Homo sapiens
agccccgtggtacatcgagtgcagcc

SEQ ID NO: 126356 - DNA, 26 bp, Homo sapiens
gccccgtggtacatcgagtgcagcca

SEQ ID NO: 126357 - DNA, 26 bp, Homo sapiens
ccccgtggtacatcgagtgcagccag

SEQ ID NO: 126358 - DNA, 26 bp, Homo sapiens
cccgtggtacatcgagtgcagccagg

SEQ ID NO: 126359 - DNA, 26 bp, Homo sapiens
ccgtggtacatcgagtgcagccaggg

SEQ ID NO: 126360 - DNA, 26 bp, Homo sapiens
cgtggtacatcgagtgcagccagggt

SEQ ID NO: 126361 - DNA, 26 bp, Homo sapiens
gtggtacatcgagtgcagccagggtt

SEQ ID NO: 126362 - DNA, 26 bp, Homo sapiens
tggtacatcgagtgcagccagggttc

SEQ ID NO: 126363 - DNA, 26 bp, Homo sapiens
ggtacatcgagtgcagccagggttcc

SEQ ID NO: 126364 - DNA, 26 bp, Homo sapiens
gtacatcgagtgcagccagggttcct

SEQ ID NO: 126365 - DNA, 26 bp, Homo sapiens
tacatcgagtgcagccagggttcctg

SEQ ID NO: 126366 - DNA, 26 bp, Homo sapiens
acatcgagtgcagccagggttcctgc

SEQ ID NO: 126367 - DNA, 26 bp, Homo sapiens
catcgagtgcagccagggttcctgca

SEQ ID NO: 126368 - DNA, 26 bp, Homo sapiens
atcgagtgcagccagggttcctgcag

SEQ ID NO: 126369 - DNA, 26 bp, Homo sapiens
tcgagtgcagccagggttcctgcagc

SEQ ID NO: 126370 - DNA, 26 bp, Homo sapiens
cgagtgcagccagggttcctgcagcc

SEQ ID NO: 126371 - DNA, 26 bp, Homo sapiens
gagtgcagccagggttcctgcagccc

SEQ ID NO: 126372 - DNA, 26 bp, Homo sapiens
agtgcagccagggttcctgcagccct

SEQ ID NO: 126373 - DNA, 26 bp, Homo sapiens
gtgcagccagggttcctgcagccctg

SEQ ID NO: 126374 - DNA, 26 bp, Homo sapiens
tgcagccagggttcctgcagccctgg

SEQ ID NO: 126375 - DNA, 26 bp, Homo sapiens
gcagccagggttcctgcagccctgga

SEQ ID NO: 126376 - DNA, 26 bp, Homo sapiens
cagccagggttcctgcagccctggat

SEQ ID NO: 126377 - DNA, 26 bp, Homo sapiens
agccagggttcctgcagccctggata

SEQ ID NO: 126378 - DNA, 26 bp, Homo sapiens
gccagggttcctgcagccctggatac

SEQ ID NO: 126379 - DNA, 26 bp, Homo sapiens
ccagggttcctgcagccctggataca

SEQ ID NO: 126380 - DNA, 26 bp, Homo sapiens
cagggttcctgcagccctggatacac

SEQ ID NO: 126381 - DNA, 26 bp, Homo sapiens
agggttcctgcagccctggatacacc

SEQ ID NO: 126382 - DNA, 26 bp, Homo sapiens
gggttcctgcagccctggatacacca

SEQ ID NO: 126383 - DNA, 26 bp, Homo sapiens
ggttcctgcagccctggatacaccat

SEQ ID NO: 126384 - DNA, 26 bp, Homo sapiens
gttcctgcagccctggatacaccatc

SEQ ID NO: 126385 - DNA, 26 bp, Homo sapiens
ttcctgcagccctggatacaccatct

SEQ ID NO: 126386 - DNA, 26 bp, Homo sapiens
tcctgcagccctggatacaccatctt

SEQ ID NO: 126387 - DNA, 26 bp, Homo sapiens
cctgcagccctggatacaccatcttc

SEQ ID NO: 126388 - DNA, 26 bp, Homo sapiens
ctgcagccctggatacaccatcttct

SEQ ID NO: 126389 - DNA, 26 bp, Homo sapiens
tgcagccctggatacaccatcttctg

SEQ ID NO: 126390 - DNA, 26 bp, Homo sapiens
gcagccctggatacaccatcttctgg

SEQ ID NO: 126391 - DNA, 26 bp, Homo sapiens
cagccctggatacaccatcttctggg

SEQ ID NO: 126392 - DNA, 26 bp, Homo sapiens
agccctggatacaccatcttctggga

SEQ ID NO: 126393 - DNA, 26 bp, Homo sapiens
gccctggatacaccatcttctgggag

SEQ ID NO: 126394 - DNA, 26 bp, Homo sapiens
ccctggatacaccatcttctgggagc

SEQ ID NO: 126395 - DNA, 26 bp, Homo sapiens
cctggatacaccatcttctgggagct

SEQ ID NO: 126396 - DNA, 26 bp, Homo sapiens
ctggatacaccatcttctgggagctg

SEQ ID NO: 126397 - DNA, 26 bp, Homo sapiens
tggatacaccatcttctgggagctga

SEQ ID NO: 126398 - DNA, 26 bp, Homo sapiens
ggatacaccatcttctgggagctgag

SEQ ID NO: 126399 - DNA, 26 bp, Homo sapiens
gatacaccatcttctgggagctgagg

SEQ ID NO: 126400 - DNA, 26 bp, Homo sapiens
atacaccatcttctgggagctgagga

SEQ ID NO: 126401 - DNA, 26 bp, Homo sapiens
tacaccatcttctgggagctgaggag

SEQ ID NO: 126402 - DNA, 26 bp, Homo sapiens
acaccatcttctgggagctgaggaga

SEQ ID NO: 126403 - DNA, 26 bp, Homo sapiens
caccatcttctgggagctgaggagag

SEQ ID NO: 126404 - DNA, 26 bp, Homo sapiens
accatcttctgggagctgaggagagg

SEQ ID NO: 126405 - DNA, 26 bp, Homo sapiens
ccatcttctgggagctgaggagaggc

SEQ ID NO: 126406 - DNA, 26 bp, Homo sapiens
catcttctgggagctgaggagaggca

SEQ ID NO: 126407 - DNA, 26 bp, Homo sapiens
atcttctgggagctgaggagaggcac

SEQ ID NO: 126408 - DNA, 26 bp, Homo sapiens
tcttctgggagctgaggagaggcaca

SEQ ID NO: 126409 - DNA, 26 bp, Homo sapiens
cttctgggagctgaggagaggcacat

SEQ ID NO: 126410 - DNA, 26 bp, Homo sapiens
ttctgggagctgaggagaggcacatg

SEQ ID NO: 126411 - DNA, 26 bp, Homo sapiens
tctgggagctgaggagaggcacatgg

SEQ ID NO: 126412 - DNA, 26 bp, Homo sapiens
ctgggagctgaggagaggcacatgga

SEQ ID NO: 126413 - DNA, 26 bp, Homo sapiens
tgggagctgaggagaggcacatggaa

SEQ ID NO: 126414 - DNA, 26 bp, Homo sapiens
gggagctgaggagaggcacatggaag

SEQ ID NO: 126415 - DNA, 26 bp, Homo sapiens
ggagctgaggagaggcacatggaagg

SEQ ID NO: 126416 - DNA, 26 bp, Homo sapiens
gagctgaggagaggcacatggaaggg

SEQ ID NO: 126417 - DNA, 26 bp, Homo sapiens
agctgaggagaggcacatggaagggg

SEQ ID NO: 126418 - DNA, 26 bp, Homo sapiens
gctgaggagaggcacatggaaggggt

SEQ ID NO: 126419 - DNA, 26 bp, Homo sapiens
ctgaggagaggcacatggaaggggta

SEQ ID NO: 126420 - DNA, 26 bp, Homo sapiens
tgaggagaggcacatggaaggggtac

SEQ ID NO: 126421 - DNA, 26 bp, Homo sapiens
gaggagaggcacatggaaggggtact

SEQ ID NO: 126422 - DNA, 26 bp, Homo sapiens
aggagaggcacatggaaggggtactg

SEQ ID NO: 126423 - DNA, 26 bp, Homo sapiens
ggagaggcacatggaaggggtactgg

SEQ ID NO: 126424 - DNA, 26 bp, Homo sapiens
gagaggcacatggaaggggtactggg

SEQ ID NO: 126425 - DNA, 26 bp, Homo sapiens
agaggcacatggaaggggtactggga

SEQ ID NO: 126426 - DNA, 26 bp, Homo sapiens
gaggcacatggaaggggtactgggag

SEQ ID NO: 126427 - DNA, 26 bp, Homo sapiens
aggcacatggaaggggtactgggagg

SEQ ID NO: 126428 - DNA, 26 bp, Homo sapiens
ggcacatggaaggggtactgggagga

SEQ ID NO: 126429 - DNA, 26 bp, Homo sapiens
gcacatggaaggggtactgggaggag

SEQ ID NO: 126430 - DNA, 26 bp, Homo sapiens
cacatggaaggggtactgggaggaga

SEQ ID NO: 126431 - DNA, 26 bp, Homo sapiens
acatggaaggggtactgggaggagaa

SEQ ID NO: 126432 - DNA, 26 bp, Homo sapiens
catggaaggggtactgggaggagaag

SEQ ID NO: 126433 - DNA, 26 bp, Homo sapiens
atggaaggggtactgggaggagaaga

SEQ ID NO: 126434 - DNA, 26 bp, Homo sapiens
tggaaggggtactgggaggagaagag

SEQ ID NO: 126435 - DNA, 26 bp, Homo sapiens
ggaaggggtactgggaggagaagagc

SEQ ID NO: 126436 - DNA, 26 bp, Homo sapiens
gaaggggtactgggaggagaagagct

SEQ ID NO: 126437 - DNA, 26 bp, Homo sapiens
aaggggtactgggaggagaagagctg

SEQ ID NO: 126438 - DNA, 26 bp, Homo sapiens
aggggtactgggaggagaagagctgg

SEQ ID NO: 126439 - DNA, 26 bp, Homo sapiens
ggggtactgggaggagaagagctgga

SEQ ID NO: 126440 - DNA, 26 bp, Homo sapiens
gggtactgggaggagaagagctggac

SEQ ID NO: 126441 - DNA, 26 bp, Homo sapiens
ggtactgggaggagaagagctggacc

SEQ ID NO: 126442 - DNA, 26 bp, Homo sapiens
gtactgggaggagaagagctggacct

SEQ ID NO: 126443 - DNA, 26 bp, Homo sapiens
tactgggaggagaagagctggacctc

SEQ ID NO: 126444 - DNA, 26 bp, Homo sapiens
actgggaggagaagagctggacctca

SEQ ID NO: 126445 - DNA, 26 bp, Homo sapiens
ctgggaggagaagagctggacctcat

SEQ ID NO: 126446 - DNA, 26 bp, Homo sapiens
tgggaggagaagagctggacctcatg

SEQ ID NO: 126447 - DNA, 26 bp, Homo sapiens
gggaggagaagagctggacctcatgg

SEQ ID NO: 126448 - DNA, 26 bp, Homo sapiens
ggaggagaagagctggacctcatggg

SEQ ID NO: 126449 - DNA, 26 bp, Homo sapiens
gaggagaagagctggacctcatgggc

SEQ ID NO: 126450 - DNA, 26 bp, Homo sapiens
aggagaagagctggacctcatgggcc

SEQ ID NO: 126451 - DNA, 26 bp, Homo sapiens
ggagaagagctggacctcatgggcca

SEQ ID NO: 126452 - DNA, 26 bp, Homo sapiens
gagaagagctggacctcatgggccag

SEQ ID NO: 126453 - DNA, 26 bp, Homo sapiens
agaagagctggacctcatgggccagg

SEQ ID NO: 126454 - DNA, 26 bp, Homo sapiens
gaagagctggacctcatgggccaggt

SEQ ID NO: 126455 - DNA, 26 bp, Homo sapiens
aagagctggacctcatgggccaggta

SEQ ID NO: 126456 - DNA, 26 bp, Homo sapiens
agagctggacctcatgggccaggtag

SEQ ID NO: 126457 - DNA, 26 bp, Homo sapiens
gagctggacctcatgggccaggtaga

SEQ ID NO: 126458 - DNA, 26 bp, Homo sapiens
agctggacctcatgggccaggtagag

SEQ ID NO: 126459 - DNA, 26 bp, Homo sapiens
gctggacctcatgggccaggtagagt

SEQ ID NO: 126460 - DNA, 26 bp, Homo sapiens
ctggacctcatgggccaggtagagtg

SEQ ID NO: 126461 - DNA, 26 bp, Homo sapiens
tggacctcatgggccaggtagagtgg

SEQ ID NO: 126462 - DNA, 26 bp, Homo sapiens
ggacctcatgggccaggtagagtggg

SEQ ID NO: 126463 - DNA, 26 bp, Homo sapiens
gacctcatgggccaggtagagtgggg

SEQ ID NO: 126464 - DNA, 26 bp, Homo sapiens
acctcatgggccaggtagagtgggga

SEQ ID NO: 126465 - DNA, 26 bp, Homo sapiens
cctcatgggccaggtagagtggggag

SEQ ID NO: 126466 - DNA, 26 bp, Homo sapiens
ctcatgggccaggtagagtggggagg

SEQ ID NO: 126467 - DNA, 26 bp, Homo sapiens
tcatgggccaggtagagtggggagga

SEQ ID NO: 126468 - DNA, 26 bp, Homo sapiens
catgggccaggtagagtggggaggag

SEQ ID NO: 126469 - DNA, 26 bp, Homo sapiens
atgggccaggtagagtggggaggagg

SEQ ID NO: 126470 - DNA, 26 bp, Homo sapiens
tgggccaggtagagtggggaggaggt

SEQ ID NO: 126471 - DNA, 26 bp, Homo sapiens
gggccaggtagagtggggaggaggtg

SEQ ID NO: 126472 - DNA, 26 bp, Homo sapiens
ggccaggtagagtggggaggaggtgg

SEQ ID NO: 126473 - DNA, 26 bp, Homo sapiens
gccaggtagagtggggaggaggtggc

SEQ ID NO: 126474 - DNA, 26 bp, Homo sapiens
ccaggtagagtggggaggaggtggcc

SEQ ID NO: 126475 - DNA, 26 bp, Homo sapiens
caggtagagtggggaggaggtggcct

SEQ ID NO: 126476 - DNA, 26 bp, Homo sapiens
aggtagagtggggaggaggtggcctt

SEQ ID NO: 126477 - DNA, 26 bp, Homo sapiens
ggtagagtggggaggaggtggccttg

SEQ ID NO: 126478 - DNA, 26 bp, Homo sapiens
gtagagtggggaggaggtggccttgg

SEQ ID NO: 126479 - DNA, 26 bp, Homo sapiens
tagagtggggaggaggtggccttggg

SEQ ID NO: 126480 - DNA, 26 bp, Homo sapiens
agagtggggaggaggtggccttggga

SEQ ID NO: 126481 - DNA, 26 bp, Homo sapiens
gagtggggaggaggtggccttgggag

SEQ ID NO: 126482 - DNA, 26 bp, Homo sapiens
agtggggaggaggtggccttgggaga

SEQ ID NO: 126483 - DNA, 26 bp, Homo sapiens
gtggggaggaggtggccttgggagag

SEQ ID NO: 126484 - DNA, 26 bp, Homo sapiens
tggggaggaggtggccttgggagagt

SEQ ID NO: 126485 - DNA, 26 bp, Homo sapiens
ggggaggaggtggccttgggagagta

SEQ ID NO: 126486 - DNA, 26 bp, Homo sapiens
gggaggaggtggccttgggagagtag

SEQ ID NO: 126487 - DNA, 26 bp, Homo sapiens
ggaggaggtggccttgggagagtagg

SEQ ID NO: 126488 - DNA, 26 bp, Homo sapiens
gaggaggtggccttgggagagtaggc

SEQ ID NO: 126489 - DNA, 26 bp, Homo sapiens
aggaggtggccttgggagagtaggct

SEQ ID NO: 126490 - DNA, 26 bp, Homo sapiens
ggaggtggccttgggagagtaggctt

SEQ ID NO: 126491 - DNA, 26 bp, Homo sapiens
gaggtggccttgggagagtaggcttt

SEQ ID NO: 126492 - DNA, 26 bp, Homo sapiens
aggtggccttgggagagtaggctttc

SEQ ID NO: 126493 - DNA, 26 bp, Homo sapiens
ggtggccttgggagagtaggctttcc

SEQ ID NO: 126494 - DNA, 26 bp, Homo sapiens
gtggccttgggagagtaggctttccc

SEQ ID NO: 126495 - DNA, 26 bp, Homo sapiens
tggccttgggagagtaggctttccca

SEQ ID NO: 126496 - DNA, 26 bp, Homo sapiens
ggccttgggagagtaggctttcccag

SEQ ID NO: 126497 - DNA, 26 bp, Homo sapiens
gccttgggagagtaggctttcccaga

SEQ ID NO: 126498 - DNA, 26 bp, Homo sapiens
ccttgggagagtaggctttcccagag

SEQ ID NO: 126499 - DNA, 26 bp, Homo sapiens
cttgggagagtaggctttcccagaga

SEQ ID NO: 126500 - DNA, 26 bp, Homo sapiens
ttgggagagtaggctttcccagagaa

SEQ ID NO: 126501 - DNA, 26 bp, Homo sapiens
tgggagagtaggctttcccagagaag

SEQ ID NO: 126502 - DNA, 26 bp, Homo sapiens
gggagagtaggctttcccagagaaga

SEQ ID NO: 126503 - DNA, 26 bp, Homo sapiens
ggagagtaggctttcccagagaagac

SEQ ID NO: 126504 - DNA, 26 bp, Homo sapiens
gagagtaggctttcccagagaagacc

SEQ ID NO: 126505 - DNA, 26 bp, Homo sapiens
agagtaggctttcccagagaagacca

SEQ ID NO: 126506 - DNA, 26 bp, Homo sapiens
gagtaggctttcccagagaagaccac

SEQ ID NO: 126507 - DNA, 26 bp, Homo sapiens
agtaggctttcccagagaagaccacc

SEQ ID NO: 126508 - DNA, 26 bp, Homo sapiens
gtaggctttcccagagaagaccacct

SEQ ID NO: 126509 - DNA, 26 bp, Homo sapiens
taggctttcccagagaagaccacctg

SEQ ID NO: 126510 - DNA, 26 bp, Homo sapiens
aggctttcccagagaagaccacctgg

SEQ ID NO: 126511 - DNA, 26 bp, Homo sapiens
ggctttcccagagaagaccacctggg

SEQ ID NO: 126512 - DNA, 26 bp, Homo sapiens
gctttcccagagaagaccacctggga

SEQ ID NO: 126513 - DNA, 26 bp, Homo sapiens
ctttcccagagaagaccacctgggag

SEQ ID NO: 126514 - DNA, 26 bp, Homo sapiens
tttcccagagaagaccacctgggagt

SEQ ID NO: 126515 - DNA, 26 bp, Homo sapiens
ttcccagagaagaccacctgggagta

SEQ ID NO: 126516 - DNA, 26 bp, Homo sapiens
tcccagagaagaccacctgggagtag

SEQ ID NO: 126517 - DNA, 26 bp, Homo sapiens
cccagagaagaccacctgggagtaga

SEQ ID NO: 126518 - DNA, 26 bp, Homo sapiens
ccagagaagaccacctgggagtagac

SEQ ID NO: 126519 - DNA, 26 bp, Homo sapiens
cagagaagaccacctgggagtagacg

SEQ ID NO: 126520 - DNA, 26 bp, Homo sapiens
agagaagaccacctgggagtagacga

SEQ ID NO: 126521 - DNA, 26 bp, Homo sapiens
gagaagaccacctgggagtagacgaa

SEQ ID NO: 126522 - DNA, 26 bp, Homo sapiens
agaagaccacctgggagtagacgaag

SEQ ID NO: 126523 - DNA, 26 bp, Homo sapiens
gaagaccacctgggagtagacgaagt

SEQ ID NO: 126524 - DNA, 26 bp, Homo sapiens
aagaccacctgggagtagacgaagta

SEQ ID NO: 126525 - DNA, 26 bp, Homo sapiens
agaccacctgggagtagacgaagtag

SEQ ID NO: 126526 - DNA, 26 bp, Homo sapiens
gaccacctgggagtagacgaagtaga

SEQ ID NO: 126527 - DNA, 26 bp, Homo sapiens
accacctgggagtagacgaagtagat

SEQ ID NO: 126528 - DNA, 26 bp, Homo sapiens
ccacctgggagtagacgaagtagatg

SEQ ID NO: 126529 - DNA, 26 bp, Homo sapiens
cacctgggagtagacgaagtagatgc

SEQ ID NO: 126530 - DNA, 26 bp, Homo sapiens
acctgggagtagacgaagtagatgcc

SEQ ID NO: 126531 - DNA, 26 bp, Homo sapiens
cctgggagtagacgaagtagatgcca

SEQ ID NO: 126532 - DNA, 26 bp, Homo sapiens
ctgggagtagacgaagtagatgccac

SEQ ID NO: 126533 - DNA, 26 bp, Homo sapiens
tgggagtagacgaagtagatgccact

SEQ ID NO: 126534 - DNA, 26 bp, Homo sapiens
gggagtagacgaagtagatgccactg

SEQ ID NO: 126535 - DNA, 26 bp, Homo sapiens
ggagtagacgaagtagatgccactgg

SEQ ID NO: 126536 - DNA, 26 bp, Homo sapiens
gagtagacgaagtagatgccactggt

SEQ ID NO: 126537 - DNA, 26 bp, Homo sapiens
agtagacgaagtagatgccactggtg

SEQ ID NO: 126538 - DNA, 26 bp, Homo sapiens
gtagacgaagtagatgccactggtgg

SEQ ID NO: 126539 - DNA, 26 bp, Homo sapiens
tagacgaagtagatgccactggtggg

SEQ ID NO: 126540 - DNA, 26 bp, Homo sapiens
agacgaagtagatgccactggtgggg

SEQ ID NO: 126541 - DNA, 26 bp, Homo sapiens
gacgaagtagatgccactggtgggga

SEQ ID NO: 126542 - DNA, 26 bp, Homo sapiens
acgaagtagatgccactggtggggac

SEQ ID NO: 126543 - DNA, 26 bp, Homo sapiens
cgaagtagatgccactggtggggacc

SEQ ID NO: 126544 - DNA, 26 bp, Homo sapiens
gaagtagatgccactggtggggacca

SEQ ID NO: 126545 - DNA, 26 bp, Homo sapiens
aagtagatgccactggtggggaccag

SEQ ID NO: 126546 - DNA, 26 bp, Homo sapiens
agtagatgccactggtggggaccagg

SEQ ID NO: 126547 - DNA, 26 bp, Homo sapiens
gtagatgccactggtggggaccagga

SEQ ID NO: 126548 - DNA, 26 bp, Homo sapiens
tagatgccactggtggggaccaggag

SEQ ID NO: 126549 - DNA, 26 bp, Homo sapiens
agatgccactggtggggaccaggaga

SEQ ID NO: 126550 - DNA, 26 bp, Homo sapiens
gatgccactggtggggaccaggagag

SEQ ID NO: 126551 - DNA, 26 bp, Homo sapiens
atgccactggtggggaccaggagaga

SEQ ID NO: 126552 - DNA, 26 bp, Homo sapiens
tgccactggtggggaccaggagagaa

SEQ ID NO: 126553 - DNA, 26 bp, Homo sapiens
gccactggtggggaccaggagagaat

SEQ ID NO: 126554 - DNA, 26 bp, Homo sapiens
ccactggtggggaccaggagagaatt

SEQ ID NO: 126555 - DNA, 26 bp, Homo sapiens
cactggtggggaccaggagagaattg

SEQ ID NO: 126556 - DNA, 26 bp, Homo sapiens
actggtggggaccaggagagaattgt

SEQ ID NO: 126557 - DNA, 26 bp, Homo sapiens
ctggtggggaccaggagagaattgtt

SEQ ID NO: 126558 - DNA, 26 bp, Homo sapiens
tggtggggaccaggagagaattgttg

SEQ ID NO: 126559 - DNA, 26 bp, Homo sapiens
ggtggggaccaggagagaattgttgc

SEQ ID NO: 126560 - DNA, 26 bp, Homo sapiens
gtggggaccaggagagaattgttgct

SEQ ID NO: 126561 - DNA, 26 bp, Homo sapiens
tggggaccaggagagaattgttgctc

SEQ ID NO: 126562 - DNA, 26 bp, Homo sapiens
ggggaccaggagagaattgttgctca

SEQ ID NO: 126563 - DNA, 26 bp, Homo sapiens
gggaccaggagagaattgttgctcaa

SEQ ID NO: 126564 - DNA, 26 bp, Homo sapiens
ggaccaggagagaattgttgctcaag

SEQ ID NO: 126565 - DNA, 26 bp, Homo sapiens
gaccaggagagaattgttgctcaagg

SEQ ID NO: 126566 - DNA, 26 bp, Homo sapiens
accaggagagaattgttgctcaagga

SEQ ID NO: 126567 - DNA, 26 bp, Homo sapiens
ccaggagagaattgttgctcaaggag

SEQ ID NO: 126568 - DNA, 26 bp, Homo sapiens
caggagagaattgttgctcaaggaga

SEQ ID NO: 126569 - DNA, 26 bp, Homo sapiens
aggagagaattgttgctcaaggagaa

SEQ ID NO: 126570 - DNA, 26 bp, Homo sapiens
ggagagaattgttgctcaaggagaaa

SEQ ID NO: 126571 - DNA, 26 bp, Homo sapiens
gagagaattgttgctcaaggagaaac

SEQ ID NO: 126572 - DNA, 26 bp, Homo sapiens
agagaattgttgctcaaggagaaacc

SEQ ID NO: 126573 - DNA, 26 bp, Homo sapiens
gagaattgttgctcaaggagaaacca

SEQ ID NO: 126574 - DNA, 26 bp, Homo sapiens
agaattgttgctcaaggagaaaccat

SEQ ID NO: 126575 - DNA, 26 bp, Homo sapiens
gaattgttgctcaaggagaaaccatc

SEQ ID NO: 126576 - DNA, 26 bp, Homo sapiens
aattgttgctcaaggagaaaccatcc

SEQ ID NO: 126577 - DNA, 26 bp, Homo sapiens
attgttgctcaaggagaaaccatcct

SEQ ID NO: 126578 - DNA, 26 bp, Homo sapiens
ttgttgctcaaggagaaaccatcctg

SEQ ID NO: 126579 - DNA, 26 bp, Homo sapiens
tgttgctcaaggagaaaccatcctgg

SEQ ID NO: 126580 - DNA, 26 bp, Homo sapiens
gttgctcaaggagaaaccatcctgga

SEQ ID NO: 126581 - DNA, 26 bp, Homo sapiens
ttgctcaaggagaaaccatcctggag

SEQ ID NO: 126582 - DNA, 26 bp, Homo sapiens
tgctcaaggagaaaccatcctggagg

SEQ ID NO: 126583 - DNA, 26 bp, Homo sapiens
gctcaaggagaaaccatcctggagga

SEQ ID NO: 126584 - DNA, 26 bp, Homo sapiens
ctcaaggagaaaccatcctggaggaa

SEQ ID NO: 126585 - DNA, 26 bp, Homo sapiens
tcaaggagaaaccatcctggaggaag

SEQ ID NO: 126586 - DNA, 26 bp, Homo sapiens
caaggagaaaccatcctggaggaagg

SEQ ID NO: 126587 - DNA, 26 bp, Homo sapiens
aaggagaaaccatcctggaggaaggc

SEQ ID NO: 126588 - DNA, 26 bp, Homo sapiens
aggagaaaccatcctggaggaaggca

SEQ ID NO: 126589 - DNA, 26 bp, Homo sapiens
ggagaaaccatcctggaggaaggcac

SEQ ID NO: 126590 - DNA, 26 bp, Homo sapiens
gagaaaccatcctggaggaaggcacg

SEQ ID NO: 126591 - DNA, 26 bp, Homo sapiens
agaaaccatcctggaggaaggcacgg

SEQ ID NO: 126592 - DNA, 26 bp, Homo sapiens
gaaaccatcctggaggaaggcacggt

SEQ ID NO: 126593 - DNA, 26 bp, Homo sapiens
aaaccatcctggaggaaggcacggtc

SEQ ID NO: 126594 - DNA, 26 bp, Homo sapiens
aaccatcctggaggaaggcacggtcc

SEQ ID NO: 126595 - DNA, 26 bp, Homo sapiens
accatcctggaggaaggcacggtccg

SEQ ID NO: 126596 - DNA, 26 bp, Homo sapiens
ccatcctggaggaaggcacggtccgt

SEQ ID NO: 126597 - DNA, 26 bp, Homo sapiens
catcctggaggaaggcacggtccgtg

SEQ ID NO: 126598 - DNA, 26 bp, Homo sapiens
atcctggaggaaggcacggtccgtgt

SEQ ID NO: 126599 - DNA, 26 bp, Homo sapiens
tcctggaggaaggcacggtccgtgtt

SEQ ID NO: 126600 - DNA, 26 bp, Homo sapiens
cctggaggaaggcacggtccgtgttt

SEQ ID NO: 126601 - DNA, 26 bp, Homo sapiens
ctggaggaaggcacggtccgtgtttg

SEQ ID NO: 126602 - DNA, 26 bp, Homo sapiens
tggaggaaggcacggtccgtgtttgc

SEQ ID NO: 126603 - DNA, 26 bp, Homo sapiens
ggaggaaggcacggtccgtgtttgct

SEQ ID NO: 126604 - DNA, 26 bp, Homo sapiens
gaggaaggcacggtccgtgtttgctc

SEQ ID NO: 126605 - DNA, 26 bp, Homo sapiens
aggaaggcacggtccgtgtttgctct

SEQ ID NO: 126606 - DNA, 26 bp, Homo sapiens
ggaaggcacggtccgtgtttgctctc

SEQ ID NO: 126607 - DNA, 26 bp, Homo sapiens
gaaggcacggtccgtgtttgctctcc

SEQ ID NO: 126608 - DNA, 26 bp, Homo sapiens
aaggcacggtccgtgtttgctctcca

SEQ ID NO: 126609 - DNA, 26 bp, Homo sapiens
aggcacggtccgtgtttgctctccag

SEQ ID NO: 126610 - DNA, 26 bp, Homo sapiens
ggcacggtccgtgtttgctctccaga

SEQ ID NO: 126611 - DNA, 26 bp, Homo sapiens
gcacggtccgtgtttgctctccagag

SEQ ID NO: 126612 - DNA, 26 bp, Homo sapiens
cacggtccgtgtttgctctccagagc

SEQ ID NO: 126613 - DNA, 26 bp, Homo sapiens
acggtccgtgtttgctctccagagca

SEQ ID NO: 126614 - DNA, 26 bp, Homo sapiens
cggtccgtgtttgctctccagagcag

SEQ ID NO: 126615 - DNA, 26 bp, Homo sapiens
ggtccgtgtttgctctccagagcagt

SEQ ID NO: 126616 - DNA, 26 bp, Homo sapiens
gtccgtgtttgctctccagagcagtg

SEQ ID NO: 126617 - DNA, 26 bp, Homo sapiens
tccgtgtttgctctccagagcagtga

SEQ ID NO: 126618 - DNA, 26 bp, Homo sapiens
ccgtgtttgctctccagagcagtgag

SEQ ID NO: 126619 - DNA, 26 bp, Homo sapiens
cgtgtttgctctccagagcagtgagt

SEQ ID NO: 126620 - DNA, 26 bp, Homo sapiens
gtgtttgctctccagagcagtgagtt

SEQ ID NO: 126621 - DNA, 26 bp, Homo sapiens
tgtttgctctccagagcagtgagttc

SEQ ID NO: 126622 - DNA, 26 bp, Homo sapiens
gtttgctctccagagcagtgagttct

SEQ ID NO: 126623 - DNA, 26 bp, Homo sapiens
tttgctctccagagcagtgagttctg

SEQ ID NO: 126624 - DNA, 26 bp, Homo sapiens
ttgctctccagagcagtgagttctgc

SEQ ID NO: 126625 - DNA, 26 bp, Homo sapiens
tgctctccagagcagtgagttctgct

SEQ ID NO: 126626 - DNA, 26 bp, Homo sapiens
gctctccagagcagtgagttctgctt

SEQ ID NO: 126627 - DNA, 26 bp, Homo sapiens
ctctccagagcagtgagttctgcttg

SEQ ID NO: 126628 - DNA, 26 bp, Homo sapiens
tctccagagcagtgagttctgcttgc

SEQ ID NO: 126629 - DNA, 26 bp, Homo sapiens
ctccagagcagtgagttctgcttgct

SEQ ID NO: 126630 - DNA, 26 bp, Homo sapiens
tccagagcagtgagttctgcttgctg

SEQ ID NO: 126631 - DNA, 26 bp, Homo sapiens
ccagagcagtgagttctgcttgctgg

SEQ ID NO: 126632 - DNA, 26 bp, Homo sapiens
cagagcagtgagttctgcttgctggg

SEQ ID NO: 126633 - DNA, 26 bp, Homo sapiens
agagcagtgagttctgcttgctgggg

SEQ ID NO: 126634 - DNA, 26 bp, Homo sapiens
gagcagtgagttctgcttgctggggt

SEQ ID NO: 126635 - DNA, 26 bp, Homo sapiens
agcagtgagttctgcttgctggggtc

SEQ ID NO: 126636 - DNA, 26 bp, Homo sapiens
gcagtgagttctgcttgctggggtct

SEQ ID NO: 126637 - DNA, 26 bp, Homo sapiens
cagtgagttctgcttgctggggtctc

SEQ ID NO: 126638 - DNA, 26 bp, Homo sapiens
agtgagttctgcttgctggggtctcc

SEQ ID NO: 126639 - DNA, 26 bp, Homo sapiens
gtgagttctgcttgctggggtctcca

SEQ ID NO: 126640 - DNA, 26 bp, Homo sapiens
tgagttctgcttgctggggtctccaa

SEQ ID NO: 126641 - DNA, 26 bp, Homo sapiens
gagttctgcttgctggggtctccaat

SEQ ID NO: 126642 - DNA, 26 bp, Homo sapiens
agttctgcttgctggggtctccaatg

SEQ ID NO: 126643 - DNA, 26 bp, Homo sapiens
gttctgcttgctggggtctccaatga

SEQ ID NO: 126644 - DNA, 26 bp, Homo sapiens
ttctgcttgctggggtctccaatgag

SEQ ID NO: 126645 - DNA, 26 bp, Homo sapiens
tctgcttgctggggtctccaatgagg

SEQ ID NO: 126646 - DNA, 26 bp, Homo sapiens
ctgcttgctggggtctccaatgaggt

SEQ ID NO: 126647 - DNA, 26 bp, Homo sapiens
tgcttgctggggtctccaatgaggtg

SEQ ID NO: 126648 - DNA, 26 bp, Homo sapiens
gcttgctggggtctccaatgaggtga

SEQ ID NO: 126649 - DNA, 26 bp, Homo sapiens
cttgctggggtctccaatgaggtgag

SEQ ID NO: 126650 - DNA, 26 bp, Homo sapiens
ttgctggggtctccaatgaggtgagc

SEQ ID NO: 126651 - DNA, 26 bp, Homo sapiens
tgctggggtctccaatgaggtgagca

SEQ ID NO: 126652 - DNA, 26 bp, Homo sapiens
gctggggtctccaatgaggtgagcag

SEQ ID NO: 126653 - DNA, 26 bp, Homo sapiens
ctggggtctccaatgaggtgagcagc

SEQ ID NO: 126654 - DNA, 26 bp, Homo sapiens
tggggtctccaatgaggtgagcagca

SEQ ID NO: 126655 - DNA, 26 bp, Homo sapiens
ggggtctccaatgaggtgagcagcag

SEQ ID NO: 126656 - DNA, 26 bp, Homo sapiens
gggtctccaatgaggtgagcagcagg

SEQ ID NO: 126657 - DNA, 26 bp, Homo sapiens
ggtctccaatgaggtgagcagcaggt

SEQ ID NO: 126658 - DNA, 26 bp, Homo sapiens
gtctccaatgaggtgagcagcaggtt

SEQ ID NO: 126659 - DNA, 26 bp, Homo sapiens
tctccaatgaggtgagcagcaggttt

SEQ ID NO: 126660 - DNA, 26 bp, Homo sapiens
ctccaatgaggtgagcagcaggtttg

SEQ ID NO: 126661 - DNA, 26 bp, Homo sapiens
tccaatgaggtgagcagcaggtttga

SEQ ID NO: 126662 - DNA, 26 bp, Homo sapiens
ccaatgaggtgagcagcaggtttgag

SEQ ID NO: 126663 - DNA, 26 bp, Homo sapiens
caatgaggtgagcagcaggtttgagg

SEQ ID NO: 126664 - DNA, 26 bp, Homo sapiens
aatgaggtgagcagcaggtttgaggg

SEQ ID NO: 126665 - DNA, 26 bp, Homo sapiens
atgaggtgagcagcaggtttgagggt

SEQ ID NO: 126666 - DNA, 26 bp, Homo sapiens
tgaggtgagcagcaggtttgagggtg

SEQ ID NO: 126667 - DNA, 26 bp, Homo sapiens
gaggtgagcagcaggtttgagggtgc

SEQ ID NO: 126668 - DNA, 26 bp, Homo sapiens
aggtgagcagcaggtttgagggtgct

SEQ ID NO: 126669 - DNA, 26 bp, Homo sapiens
ggtgagcagcaggtttgagggtgctg

SEQ ID NO: 126670 - DNA, 26 bp, Homo sapiens
gtgagcagcaggtttgagggtgctgt

SEQ ID NO: 126671 - DNA, 26 bp, Homo sapiens
tgagcagcaggtttgagggtgctgtg

SEQ ID NO: 126672 - DNA, 26 bp, Homo sapiens
gagcagcaggtttgagggtgctgtgg

SEQ ID NO: 126673 - DNA, 26 bp, Homo sapiens
agcagcaggtttgagggtgctgtggg

SEQ ID NO: 126674 - DNA, 26 bp, Homo sapiens
gcagcaggtttgagggtgctgtgggc

SEQ ID NO: 126675 - DNA, 26 bp, Homo sapiens
cagcaggtttgagggtgctgtgggca

SEQ ID NO: 126676 - DNA, 26 bp, Homo sapiens
agcaggtttgagggtgctgtgggcaa

SEQ ID NO: 126677 - DNA, 26 bp, Homo sapiens
gcaggtttgagggtgctgtgggcaag

SEQ ID NO: 126678 - DNA, 26 bp, Homo sapiens
caggtttgagggtgctgtgggcaaga

SEQ ID NO: 126679 - DNA, 26 bp, Homo sapiens
aggtttgagggtgctgtgggcaagat

SEQ ID NO: 126680 - DNA, 26 bp, Homo sapiens
ggtttgagggtgctgtgggcaagatg

SEQ ID NO: 126681 - DNA, 26 bp, Homo sapiens
gtttgagggtgctgtgggcaagatgc

SEQ ID NO: 126682 - DNA, 26 bp, Homo sapiens
tttgagggtgctgtgggcaagatgca

SEQ ID NO: 126683 - DNA, 26 bp, Homo sapiens
ttgagggtgctgtgggcaagatgcat

SEQ ID NO: 126684 - DNA, 26 bp, Homo sapiens
tgagggtgctgtgggcaagatgcatc

SEQ ID NO: 126685 - DNA, 26 bp, Homo sapiens
gagggtgctgtgggcaagatgcatct

SEQ ID NO: 126686 - DNA, 26 bp, Homo sapiens
agggtgctgtgggcaagatgcatctt

SEQ ID NO: 126687 - DNA, 26 bp, Homo sapiens
gggtgctgtgggcaagatgcatcttg

SEQ ID NO: 126688 - DNA, 26 bp, Homo sapiens
ggtgctgtgggcaagatgcatcttgg

SEQ ID NO: 126689 - DNA, 26 bp, Homo sapiens
gtgctgtgggcaagatgcatcttggg

SEQ ID NO: 126690 - DNA, 26 bp, Homo sapiens
tgctgtgggcaagatgcatcttgggg

SEQ ID NO: 126691 - DNA, 26 bp, Homo sapiens
gctgtgggcaagatgcatcttggggt

SEQ ID NO: 126692 - DNA, 26 bp, Homo sapiens
ctgtgggcaagatgcatcttggggtg

SEQ ID NO: 126693 - DNA, 26 bp, Homo sapiens
tgtgggcaagatgcatcttggggtgc

SEQ ID NO: 126694 - DNA, 26 bp, Homo sapiens
gtgggcaagatgcatcttggggtgct

SEQ ID NO: 126695 - DNA, 26 bp, Homo sapiens
tgggcaagatgcatcttggggtgctg

SEQ ID NO: 126696 - DNA, 26 bp, Homo sapiens
gggcaagatgcatcttggggtgctga

SEQ ID NO: 126697 - DNA, 26 bp, Homo sapiens
ggcaagatgcatcttggggtgctgac

SEQ ID NO: 126698 - DNA, 26 bp, Homo sapiens
gcaagatgcatcttggggtgctgacg

SEQ ID NO: 126699 - DNA, 26 bp, Homo sapiens
caagatgcatcttggggtgctgacgg

SEQ ID NO: 126700 - DNA, 26 bp, Homo sapiens
aagatgcatcttggggtgctgacggg

SEQ ID NO: 126701 - DNA, 26 bp, Homo sapiens
agatgcatcttggggtgctgacgggc

SEQ ID NO: 126702 - DNA, 26 bp, Homo sapiens
gatgcatcttggggtgctgacgggca

SEQ ID NO: 126703 - DNA, 26 bp, Homo sapiens
atgcatcttggggtgctgacgggcag

SEQ ID NO: 126704 - DNA, 26 bp, Homo sapiens
tgcatcttggggtgctgacgggcagt

SEQ ID NO: 126705 - DNA, 26 bp, Homo sapiens
gcatcttggggtgctgacgggcagtc

SEQ ID NO: 126706 - DNA, 26 bp, Homo sapiens
catcttggggtgctgacgggcagtct

SEQ ID NO: 126707 - DNA, 26 bp, Homo sapiens
atcttggggtgctgacgggcagtctg

SEQ ID NO: 126708 - DNA, 26 bp, Homo sapiens
tcttggggtgctgacgggcagtctgg

SEQ ID NO: 126709 - DNA, 26 bp, Homo sapiens
cttggggtgctgacgggcagtctggg

SEQ ID NO: 126710 - DNA, 26 bp, Homo sapiens
ttggggtgctgacgggcagtctgggc

SEQ ID NO: 126711 - DNA, 26 bp, Homo sapiens
tggggtgctgacgggcagtctgggca

SEQ ID NO: 126712 - DNA, 26 bp, Homo sapiens
ggggtgctgacgggcagtctgggcag

SEQ ID NO: 126713 - DNA, 26 bp, Homo sapiens
gggtgctgacgggcagtctgggcagc

SEQ ID NO: 126714 - DNA, 26 bp, Homo sapiens
ggtgctgacgggcagtctgggcagct

SEQ ID NO: 126715 - DNA, 26 bp, Homo sapiens
gtgctgacgggcagtctgggcagctg

SEQ ID NO: 126716 - DNA, 26 bp, Homo sapiens
tgctgacgggcagtctgggcagctga

SEQ ID NO: 126717 - DNA, 26 bp, Homo sapiens
gctgacgggcagtctgggcagctgaa

SEQ ID NO: 126718 - DNA, 26 bp, Homo sapiens
ctgacgggcagtctgggcagctgaag

SEQ ID NO: 126719 - DNA, 26 bp, Homo sapiens
tgacgggcagtctgggcagctgaagg

SEQ ID NO: 126720 - DNA, 26 bp, Homo sapiens
gacgggcagtctgggcagctgaaggt

SEQ ID NO: 126721 - DNA, 26 bp, Homo sapiens
acgggcagtctgggcagctgaaggtg

SEQ ID NO: 126722 - DNA, 26 bp, Homo sapiens
cgggcagtctgggcagctgaaggtgt

SEQ ID NO: 126723 - DNA, 26 bp, Homo sapiens
gggcagtctgggcagctgaaggtgtg

SEQ ID NO: 126724 - DNA, 26 bp, Homo sapiens
ggcagtctgggcagctgaaggtgtga

SEQ ID NO: 126725 - DNA, 26 bp, Homo sapiens
gcagtctgggcagctgaaggtgtgag

SEQ ID NO: 126726 - DNA, 26 bp, Homo sapiens
cagtctgggcagctgaaggtgtgagg

SEQ ID NO: 126727 - DNA, 26 bp, Homo sapiens
agtctgggcagctgaaggtgtgaggc

SEQ ID NO: 126728 - DNA, 26 bp, Homo sapiens
gtctgggcagctgaaggtgtgaggcc

SEQ ID NO: 126729 - DNA, 26 bp, Homo sapiens
tctgggcagctgaaggtgtgaggcca

SEQ ID NO: 126730 - DNA, 26 bp, Homo sapiens
ctgggcagctgaaggtgtgaggccaa

SEQ ID NO: 126731 - DNA, 26 bp, Homo sapiens
tgggcagctgaaggtgtgaggccaac

SEQ ID NO: 126732 - DNA, 26 bp, Homo sapiens
gggcagctgaaggtgtgaggccaaca

SEQ ID NO: 126733 - DNA, 26 bp, Homo sapiens
ggcagctgaaggtgtgaggccaacac

SEQ ID NO: 126734 - DNA, 26 bp, Homo sapiens
gcagctgaaggtgtgaggccaacacc

SEQ ID NO: 126735 - DNA, 26 bp, Homo sapiens
cagctgaaggtgtgaggccaacacca

SEQ ID NO: 126736 - DNA, 26 bp, Homo sapiens
agctgaaggtgtgaggccaacaccag

SEQ ID NO: 126737 - DNA, 26 bp, Homo sapiens
gctgaaggtgtgaggccaacaccagg

SEQ ID NO: 126738 - DNA, 26 bp, Homo sapiens
ctgaaggtgtgaggccaacaccaggg

SEQ ID NO: 126739 - DNA, 26 bp, Homo sapiens
tgaaggtgtgaggccaacaccaggga

SEQ ID NO: 126740 - DNA, 26 bp, Homo sapiens
gaaggtgtgaggccaacaccagggag

SEQ ID NO: 126741 - DNA, 26 bp, Homo sapiens
aaggtgtgaggccaacaccagggagc

SEQ ID NO: 126742 - DNA, 26 bp, Homo sapiens
aggtgtgaggccaacaccagggagcc

SEQ ID NO: 126743 - DNA, 26 bp, Homo sapiens
ggtgtgaggccaacaccagggagccc

SEQ ID NO: 126744 - DNA, 26 bp, Homo sapiens
gtgtgaggccaacaccagggagcccc

SEQ ID NO: 126745 - DNA, 26 bp, Homo sapiens
tgtgaggccaacaccagggagcccct

SEQ ID NO: 126746 - DNA, 26 bp, Homo sapiens
gtgaggccaacaccagggagcccctg

SEQ ID NO: 126747 - DNA, 26 bp, Homo sapiens
tgaggccaacaccagggagcccctgg

SEQ ID NO: 126748 - DNA, 26 bp, Homo sapiens
gaggccaacaccagggagcccctggg

SEQ ID NO: 126749 - DNA, 26 bp, Homo sapiens
aggccaacaccagggagcccctgggc

SEQ ID NO: 126750 - DNA, 26 bp, Homo sapiens
ggccaacaccagggagcccctgggcc

SEQ ID NO: 126751 - DNA, 26 bp, Homo sapiens
gccaacaccagggagcccctgggccc

SEQ ID NO: 126752 - DNA, 26 bp, Homo sapiens
ccaacaccagggagcccctgggcccc

SEQ ID NO: 126753 - DNA, 26 bp, Homo sapiens
caacaccagggagcccctgggcccca

SEQ ID NO: 126754 - DNA, 26 bp, Homo sapiens
aacaccagggagcccctgggccccag

SEQ ID NO: 126755 - DNA, 26 bp, Homo sapiens
acaccagggagcccctgggccccagg

SEQ ID NO: 126756 - DNA, 26 bp, Homo sapiens
caccagggagcccctgggccccaggc

SEQ ID NO: 126757 - DNA, 26 bp, Homo sapiens
accagggagcccctgggccccaggca

SEQ ID NO: 126758 - DNA, 26 bp, Homo sapiens
ccagggagcccctgggccccaggcag

SEQ ID NO: 126759 - DNA, 26 bp, Homo sapiens
cagggagcccctgggccccaggcagc

SEQ ID NO: 126760 - DNA, 26 bp, Homo sapiens
agggagcccctgggccccaggcagca

SEQ ID NO: 126761 - DNA, 26 bp, Homo sapiens
gggagcccctgggccccaggcagcag

SEQ ID NO: 126762 - DNA, 26 bp, Homo sapiens
ggagcccctgggccccaggcagcaga

SEQ ID NO: 126763 - DNA, 26 bp, Homo sapiens
gagcccctgggccccaggcagcagaa

SEQ ID NO: 126764 - DNA, 26 bp, Homo sapiens
agcccctgggccccaggcagcagaac

SEQ ID NO: 126765 - DNA, 26 bp, Homo sapiens
gcccctgggccccaggcagcagaacc

SEQ ID NO: 126766 - DNA, 26 bp, Homo sapiens
cccctgggccccaggcagcagaacca

SEQ ID NO: 126767 - DNA, 26 bp, Homo sapiens
ccctgggccccaggcagcagaaccag

SEQ ID NO: 126768 - DNA, 26 bp, Homo sapiens
cctgggccccaggcagcagaaccagc

SEQ ID NO: 126769 - DNA, 26 bp, Homo sapiens
ctgggccccaggcagcagaaccagca

SEQ ID NO: 126770 - DNA, 26 bp, Homo sapiens
tgggccccaggcagcagaaccagcag

SEQ ID NO: 126771 - DNA, 26 bp, Homo sapiens
gggccccaggcagcagaaccagcagc

SEQ ID NO: 126772 - DNA, 26 bp, Homo sapiens
ggccccaggcagcagaaccagcagca

SEQ ID NO: 126773 - DNA, 26 bp, Homo sapiens
gccccaggcagcagaaccagcagcag

SEQ ID NO: 126774 - DNA, 26 bp, Homo sapiens
ccccaggcagcagaaccagcagcagc

SEQ ID NO: 126775 - DNA, 26 bp, Homo sapiens
cccaggcagcagaaccagcagcagcc

SEQ ID NO: 126776 - DNA, 26 bp, Homo sapiens
ccaggcagcagaaccagcagcagccc

SEQ ID NO: 126777 - DNA, 26 bp, Homo sapiens
caggcagcagaaccagcagcagcccc

SEQ ID NO: 126778 - DNA, 26 bp, Homo sapiens
aggcagcagaaccagcagcagcccca

SEQ ID NO: 126779 - DNA, 26 bp, Homo sapiens
ggcagcagaaccagcagcagccccag

SEQ ID NO: 126780 - DNA, 26 bp, Homo sapiens
gcagcagaaccagcagcagccccaga

SEQ ID NO: 126781 - DNA, 26 bp, Homo sapiens
cagcagaaccagcagcagccccagaa

SEQ ID NO: 126782 - DNA, 26 bp, Homo sapiens
agcagaaccagcagcagccccagaag

SEQ ID NO: 126783 - DNA, 26 bp, Homo sapiens
gcagaaccagcagcagccccagaagg

SEQ ID NO: 126784 - DNA, 26 bp, Homo sapiens
cagaaccagcagcagccccagaagga

SEQ ID NO: 126785 - DNA, 26 bp, Homo sapiens
agaaccagcagcagccccagaaggag

SEQ ID NO: 126786 - DNA, 26 bp, Homo sapiens
gaaccagcagcagccccagaaggagg

SEQ ID NO: 126787 - DNA, 26 bp, Homo sapiens
aaccagcagcagccccagaaggagga

SEQ ID NO: 126788 - DNA, 26 bp, Homo sapiens
accagcagcagccccagaaggaggag

SEQ ID NO: 126789 - DNA, 26 bp, Homo sapiens
ccagcagcagccccagaaggaggagg

SEQ ID NO: 126790 - DNA, 26 bp, Homo sapiens
cagcagcagccccagaaggaggaggt

SEQ ID NO: 126791 - DNA, 26 bp, Homo sapiens
agcagcagccccagaaggaggaggtg

SEQ ID NO: 126792 - DNA, 26 bp, Homo sapiens
gcagcagccccagaaggaggaggtgt

SEQ ID NO: 126793 - DNA, 26 bp, Homo sapiens
cagcagccccagaaggaggaggtgta

SEQ ID NO: 126794 - DNA, 26 bp, Homo sapiens
agcagccccagaaggaggaggtgtag

SEQ ID NO: 126795 - DNA, 26 bp, Homo sapiens
gcagccccagaaggaggaggtgtagg

SEQ ID NO: 126796 - DNA, 26 bp, Homo sapiens
cagccccagaaggaggaggtgtaggg

SEQ ID NO: 126797 - DNA, 26 bp, Homo sapiens
agccccagaaggaggaggtgtagggt

SEQ ID NO: 126798 - DNA, 26 bp, Homo sapiens
gccccagaaggaggaggtgtagggtg

SEQ ID NO: 126799 - DNA, 26 bp, Homo sapiens
ccccagaaggaggaggtgtagggtgg

SEQ ID NO: 126800 - DNA, 26 bp, Homo sapiens
cccagaaggaggaggtgtagggtggt

SEQ ID NO: 126801 - DNA, 26 bp, Homo sapiens
ccagaaggaggaggtgtagggtggtg

SEQ ID NO: 126802 - DNA, 26 bp, Homo sapiens
cagaaggaggaggtgtagggtggtgc

SEQ ID NO: 126803 - DNA, 26 bp, Homo sapiens
agaaggaggaggtgtagggtggtgcc

SEQ ID NO: 126804 - DNA, 26 bp, Homo sapiens
gaaggaggaggtgtagggtggtgcca

SEQ ID NO: 126805 - DNA, 26 bp, Homo sapiens
aaggaggaggtgtagggtggtgccac

SEQ ID NO: 126806 - DNA, 26 bp, Homo sapiens
aggaggaggtgtagggtggtgccaca

SEQ ID NO: 126807 - DNA, 26 bp, Homo sapiens
ggaggaggtgtagggtggtgccacac

SEQ ID NO: 126808 - DNA, 26 bp, Homo sapiens
gaggaggtgtagggtggtgccacaca

SEQ ID NO: 126809 - DNA, 26 bp, Homo sapiens
aggaggtgtagggtggtgccacacac

SEQ ID NO: 126810 - DNA, 26 bp, Homo sapiens
ggaggtgtagggtggtgccacacacc

SEQ ID NO: 126811 - DNA, 26 bp, Homo sapiens
gaggtgtagggtggtgccacacaccc

SEQ ID NO: 126812 - DNA, 26 bp, Homo sapiens
aggtgtagggtggtgccacacaccct

SEQ ID NO: 126813 - DNA, 26 bp, Homo sapiens
ggtgtagggtggtgccacacaccctt

SEQ ID NO: 126814 - DNA, 26 bp, Homo sapiens
gtgtagggtggtgccacacacccttg

SEQ ID NO: 126815 - DNA, 26 bp, Homo sapiens
tgtagggtggtgccacacacccttgg

SEQ ID NO: 126816 - DNA, 26 bp, Homo sapiens
gtagggtggtgccacacacccttggg

SEQ ID NO: 126817 - DNA, 26 bp, Homo sapiens
tagggtggtgccacacacccttggga

SEQ ID NO: 126818 - DNA, 26 bp, Homo sapiens
agggtggtgccacacacccttgggag

SEQ ID NO: 126819 - DNA, 26 bp, Homo sapiens
gggtggtgccacacacccttgggagg

SEQ ID NO: 126820 - DNA, 26 bp, Homo sapiens
ggtggtgccacacacccttgggagga

SEQ ID NO: 126821 - DNA, 26 bp, Homo sapiens
gtggtgccacacacccttgggaggaa

SEQ ID NO: 126822 - DNA, 26 bp, Homo sapiens
tggtgccacacacccttgggaggaag

SEQ ID NO: 126823 - DNA, 26 bp, Homo sapiens
ggtgccacacacccttgggaggaaga

SEQ ID NO: 126824 - DNA, 26 bp, Homo sapiens
gtgccacacacccttgggaggaagag

SEQ ID NO: 126825 - DNA, 26 bp, Homo sapiens
tgccacacacccttgggaggaagaga

SEQ ID NO: 126826 - DNA, 26 bp, Homo sapiens
gccacacacccttgggaggaagagac

SEQ ID NO: 126827 - DNA, 26 bp, Homo sapiens
ccacacacccttgggaggaagagacg

SEQ ID NO: 126828 - DNA, 26 bp, Homo sapiens
cacacacccttgggaggaagagacgt

SEQ ID NO: 126829 - DNA, 26 bp, Homo sapiens
acacacccttgggaggaagagacgtt

SEQ ID NO: 126830 - DNA, 26 bp, Homo sapiens
cacacccttgggaggaagagacgttc

SEQ ID NO: 126831 - DNA, 26 bp, Homo sapiens
acacccttgggaggaagagacgttca

SEQ ID NO: 126832 - DNA, 26 bp, Homo sapiens
cacccttgggaggaagagacgttcag

SEQ ID NO: 126833 - DNA, 26 bp, Homo sapiens
acccttgggaggaagagacgttcagg

SEQ ID NO: 126834 - DNA, 26 bp, Homo sapiens
cccttgggaggaagagacgttcaggt

SEQ ID NO: 126835 - DNA, 26 bp, Homo sapiens
ccttgggaggaagagacgttcaggtg

SEQ ID NO: 126836 - DNA, 26 bp, Homo sapiens
cttgggaggaagagacgttcaggtgg

SEQ ID NO: 126837 - DNA, 26 bp, Homo sapiens
ttgggaggaagagacgttcaggtggt

SEQ ID NO: 126838 - DNA, 26 bp, Homo sapiens
tgggaggaagagacgttcaggtggtg

SEQ ID NO: 126839 - DNA, 26 bp, Homo sapiens
gggaggaagagacgttcaggtggtgt

SEQ ID NO: 126840 - DNA, 26 bp, Homo sapiens
ggaggaagagacgttcaggtggtgtc

SEQ ID NO: 126841 - DNA, 26 bp, Homo sapiens
gaggaagagacgttcaggtggtgtca

SEQ ID NO: 126842 - DNA, 26 bp, Homo sapiens
aggaagagacgttcaggtggtgtcat

SEQ ID NO: 126843 - DNA, 26 bp, Homo sapiens
ggaagagacgttcaggtggtgtcatg

SEQ ID NO: 126844 - DNA, 26 bp, Homo sapiens
gaagagacgttcaggtggtgtcatgg

SEQ ID NO: 126845 - DNA, 26 bp, Homo sapiens
aagagacgttcaggtggtgtcatggg

SEQ ID NO: 126846 - DNA, 26 bp, Homo sapiens
agagacgttcaggtggtgtcatgggg

SEQ ID NO: 126847 - DNA, 26 bp, Homo sapiens
gagacgttcaggtggtgtcatgggga

SEQ ID NO: 126848 - DNA, 26 bp, Homo sapiens
agacgttcaggtggtgtcatggggag

SEQ ID NO: 126849 - DNA, 26 bp, Homo sapiens
gacgttcaggtggtgtcatggggaga

SEQ ID NO: 126850 - DNA, 26 bp, Homo sapiens
acgttcaggtggtgtcatggggagaa

SEQ ID NO: 126851 - DNA, 26 bp, Homo sapiens
cgttcaggtggtgtcatggggagaac

SEQ ID NO: 126852 - DNA, 26 bp, Homo sapiens
gttcaggtggtgtcatggggagaacc

SEQ ID NO: 126853 - DNA, 26 bp, Homo sapiens
ttcaggtggtgtcatggggagaacct

SEQ ID NO: 126854 - DNA, 26 bp, Homo sapiens
tcaggtggtgtcatggggagaacctg

SEQ ID NO: 126855 - DNA, 26 bp, Homo sapiens
caggtggtgtcatggggagaacctgc

SEQ ID NO: 126856 - DNA, 26 bp, Homo sapiens
aggtggtgtcatggggagaacctgct

SEQ ID NO: 126857 - DNA, 26 bp, Homo sapiens
ggtggtgtcatggggagaacctgctg

SEQ ID NO: 126858 - DNA, 26 bp, Homo sapiens
gtggtgtcatggggagaacctgctgt

SEQ ID NO: 126859 - DNA, 26 bp, Homo sapiens
tggtgtcatggggagaacctgctgtg

SEQ ID NO: 126860 - DNA, 26 bp, Homo sapiens
ggtgtcatggggagaacctgctgtgc

SEQ ID NO: 126861 - DNA, 26 bp, Homo sapiens
gtgtcatggggagaacctgctgtgcg

SEQ ID NO: 126862 - DNA, 26 bp, Homo sapiens
tgtcatggggagaacctgctgtgcgg

SEQ ID NO: 126863 - DNA, 26 bp, Homo sapiens
gtcatggggagaacctgctgtgcgga

SEQ ID NO: 126864 - DNA, 26 bp, Homo sapiens
tcatggggagaacctgctgtgcggag

SEQ ID NO: 126865 - DNA, 26 bp, Homo sapiens
catggggagaacctgctgtgcggagc

SEQ ID NO: 126866 - DNA, 26 bp, Homo sapiens
atggggagaacctgctgtgcggagcc

SEQ ID NO: 126867 - DNA, 26 bp, Homo sapiens
tggggagaacctgctgtgcggagccc

SEQ ID NO: 126868 - DNA, 26 bp, Homo sapiens
ggggagaacctgctgtgcggagcccc

SEQ ID NO: 126869 - DNA, 26 bp, Homo sapiens
gggagaacctgctgtgcggagcccct

SEQ ID NO: 126870 - DNA, 26 bp, Homo sapiens
ggagaacctgctgtgcggagcccctg

SEQ ID NO: 126871 - DNA, 26 bp, Homo sapiens
gagaacctgctgtgcggagcccctgg

SEQ ID NO: 126872 - DNA, 26 bp, Homo sapiens
agaacctgctgtgcggagcccctggg

SEQ ID NO: 126873 - DNA, 26 bp, Homo sapiens
gaacctgctgtgcggagcccctgggc

SEQ ID NO: 126874 - DNA, 26 bp, Homo sapiens
aacctgctgtgcggagcccctgggcc

SEQ ID NO: 126875 - DNA, 26 bp, Homo sapiens
acctgctgtgcggagcccctgggccc

SEQ ID NO: 126876 - DNA, 26 bp, Homo sapiens
cctgctgtgcggagcccctgggcccg

SEQ ID NO: 126877 - DNA, 26 bp, Homo sapiens
ctgctgtgcggagcccctgggcccgg

SEQ ID NO: 126878 - DNA, 26 bp, Homo sapiens
tgctgtgcggagcccctgggcccgga

SEQ ID NO: 126879 - DNA, 26 bp, Homo sapiens
gctgtgcggagcccctgggcccggac

SEQ ID NO: 126880 - DNA, 26 bp, Homo sapiens
ctgtgcggagcccctgggcccggacg

SEQ ID NO: 126881 - DNA, 26 bp, Homo sapiens
tgtgcggagcccctgggcccggacgc

SEQ ID NO: 126882 - DNA, 26 bp, Homo sapiens
gtgcggagcccctgggcccggacgct

SEQ ID NO: 126883 - DNA, 26 bp, Homo sapiens
tgcggagcccctgggcccggacgctc

SEQ ID NO: 126884 - DNA, 26 bp, Homo sapiens
gcggagcccctgggcccggacgctca

SEQ ID NO: 126885 - DNA, 26 bp, Homo sapiens
cggagcccctgggcccggacgctcag

SEQ ID NO: 126886 - DNA, 26 bp, Homo sapiens
ggagcccctgggcccggacgctcagg

SEQ ID NO: 126887 - DNA, 26 bp, Homo sapiens
gagcccctgggcccggacgctcaggt

SEQ ID NO: 126888 - DNA, 26 bp, Homo sapiens
agcccctgggcccggacgctcaggtc

SEQ ID NO: 126889 - DNA, 26 bp, Homo sapiens
gcccctgggcccggacgctcaggtcc

SEQ ID NO: 126890 - DNA, 26 bp, Homo sapiens
cccctgggcccggacgctcaggtccc

SEQ ID NO: 126891 - DNA, 26 bp, Homo sapiens
ccctgggcccggacgctcaggtccct

SEQ ID NO: 126892 - DNA, 26 bp, Homo sapiens
cctgggcccggacgctcaggtccctt

SEQ ID NO: 126893 - DNA, 26 bp, Homo sapiens
ctgggcccggacgctcaggtcccttt

SEQ ID NO: 126894 - DNA, 26 bp, Homo sapiens
tgggcccggacgctcaggtcccttta

SEQ ID NO: 126895 - DNA, 26 bp, Homo sapiens
gggcccggacgctcaggtccctttat

SEQ ID NO: 126896 - DNA, 26 bp, Homo sapiens
ggcccggacgctcaggtccctttata

SEQ ID NO: 126897 - DNA, 26 bp, Homo sapiens
gcccggacgctcaggtccctttatag

SEQ ID NO: 126898 - DNA, 26 bp, Homo sapiens
cccggacgctcaggtccctttataga

SEQ ID NO: 126899 - DNA, 26 bp, Homo sapiens
ccggacgctcaggtccctttatagag

SEQ ID NO: 126900 - DNA, 26 bp, Homo sapiens
cggacgctcaggtccctttatagagg

SEQ ID NO: 126901 - DNA, 26 bp, Homo sapiens
ggacgctcaggtccctttatagagga

SEQ ID NO: 126902 - DNA, 26 bp, Homo sapiens
gacgctcaggtccctttatagaggaa

SEQ ID NO: 126903 - DNA, 26 bp, Homo sapiens
acgctcaggtccctttatagaggaag

SEQ ID NO: 126904 - DNA, 26 bp, Homo sapiens
cgctcaggtccctttatagaggaagc

SEQ ID NO: 126905 - DNA, 26 bp, Homo sapiens
gctcaggtccctttatagaggaagcg

SEQ ID NO: 126906 - DNA, 26 bp, Homo sapiens
ctcaggtccctttatagaggaagcgg

SEQ ID NO: 126907 - DNA, 26 bp, Homo sapiens
tcaggtccctttatagaggaagcggc

SEQ ID NO: 126908 - DNA, 26 bp, Homo sapiens
caggtccctttatagaggaagcggca

SEQ ID NO: 126909 - DNA, 26 bp, Homo sapiens
aggtccctttatagaggaagcggcag

SEQ ID NO: 126910 - DNA, 26 bp, Homo sapiens
ggtccctttatagaggaagcggcagt

SEQ ID NO: 126911 - DNA, 26 bp, Homo sapiens
gtccctttatagaggaagcggcagtg

SEQ ID NO: 126912 - DNA, 26 bp, Homo sapiens
tccctttatagaggaagcggcagtgg

SEQ ID NO: 126913 - DNA, 26 bp, Homo sapiens
ccctttatagaggaagcggcagtggc

SEQ ID NO: 126914 - DNA, 26 bp, Homo sapiens
cctttatagaggaagcggcagtggca

SEQ ID NO: 126915 - DNA, 26 bp, Homo sapiens
ctttatagaggaagcggcagtggcag

SEQ ID NO: 126916 - DNA, 26 bp, Homo sapiens
tttatagaggaagcggcagtggcagc

SEQ ID NO: 126917 - DNA, 26 bp, Homo sapiens
ttatagaggaagcggcagtggcagcg

SEQ ID NO: 126918 - DNA, 26 bp, Homo sapiens
tatagaggaagcggcagtggcagcgt

SEQ ID NO: 126919 - DNA, 26 bp, Homo sapiens
atagaggaagcggcagtggcagcgtg

SEQ ID NO: 126920 - DNA, 26 bp, Homo sapiens
tagaggaagcggcagtggcagcgtgg

SEQ ID NO: 126921 - DNA, 26 bp, Homo sapiens
agaggaagcggcagtggcagcgtggc

SEQ ID NO: 126922 - DNA, 26 bp, Homo sapiens
gaggaagcggcagtggcagcgtggca

SEQ ID NO: 126923 - DNA, 26 bp, Homo sapiens
aggaagcggcagtggcagcgtggcag

SEQ ID NO: 126924 - DNA, 26 bp, Homo sapiens
ggaagcggcagtggcagcgtggcagg

SEQ ID NO: 126925 - DNA, 26 bp, Homo sapiens
gaagcggcagtggcagcgtggcaggc

SEQ ID NO: 126926 - DNA, 26 bp, Homo sapiens
aagcggcagtggcagcgtggcaggca

SEQ ID NO: 126927 - DNA, 26 bp, Homo sapiens
agcggcagtggcagcgtggcaggcag

SEQ ID NO: 126928 - DNA, 26 bp, Homo sapiens
gcggcagtggcagcgtggcaggcagc

SEQ ID NO: 126929 - DNA, 26 bp, Homo sapiens
cggcagtggcagcgtggcaggcagcg

SEQ ID NO: 126930 - DNA, 26 bp, Homo sapiens
ggcagtggcagcgtggcaggcagcgg

SEQ ID NO: 126931 - DNA, 26 bp, Homo sapiens
gcagtggcagcgtggcaggcagcggg

SEQ ID NO: 126932 - DNA, 26 bp, Homo sapiens
cagtggcagcgtggcaggcagcgggc

SEQ ID NO: 126933 - DNA, 26 bp, Homo sapiens
agtggcagcgtggcaggcagcgggcg

SEQ ID NO: 126934 - DNA, 26 bp, Homo sapiens
gtggcagcgtggcaggcagcgggcgg

SEQ ID NO: 126935 - DNA, 26 bp, Homo sapiens
tggcagcgtggcaggcagcgggcggg

SEQ ID NO: 126936 - DNA, 26 bp, Homo sapiens
ggcagcgtggcaggcagcgggcgggt

SEQ ID NO: 126937 - DNA, 26 bp, Homo sapiens
gcagcgtggcaggcagcgggcgggtt

SEQ ID NO: 126938 - DNA, 26 bp, Homo sapiens
cagcgtggcaggcagcgggcgggttc

SEQ ID NO: 126939 - DNA, 26 bp, Homo sapiens
agcgtggcaggcagcgggcgggttct

SEQ ID NO: 126940 - DNA, 26 bp, Homo sapiens
gcgtggcaggcagcgggcgggttcta

SEQ ID NO: 126941 - DNA, 26 bp, Homo sapiens
cgtggcaggcagcgggcgggttctag

SEQ ID NO: 126942 - DNA, 26 bp, Homo sapiens
gtggcaggcagcgggcgggttctagg

SEQ ID NO: 126943 - DNA, 26 bp, Homo sapiens
tggcaggcagcgggcgggttctaggt

SEQ ID NO: 126944 - DNA, 26 bp, Homo sapiens
ggcaggcagcgggcgggttctaggtc

SEQ ID NO: 126945 - DNA, 26 bp, Homo sapiens
gcaggcagcgggcgggttctaggtcg

SEQ ID NO: 126946 - DNA, 26 bp, Homo sapiens
caggcagcgggcgggttctaggtcgg

SEQ ID NO: 126947 - DNA, 26 bp, Homo sapiens
aggcagcgggcgggttctaggtcggg

SEQ ID NO: 126948 - DNA, 26 bp, Homo sapiens
ggcagcgggcgggttctaggtcgggg

SEQ ID NO: 126949 - DNA, 26 bp, Homo sapiens
gcagcgggcgggttctaggtcggggc

SEQ ID NO: 126950 - DNA, 26 bp, Homo sapiens
cagcgggcgggttctaggtcggggct

SEQ ID NO: 126951 - DNA, 26 bp, Homo sapiens
agcgggcgggttctaggtcggggctg

SEQ ID NO: 126952 - DNA, 26 bp, Homo sapiens
gcgggcgggttctaggtcggggctgg

SEQ ID NO: 126953 - DNA, 26 bp, Homo sapiens
cgggcgggttctaggtcggggctggg

SEQ ID NO: 126954 - DNA, 26 bp, Homo sapiens
gggcgggttctaggtcggggctgggg

SEQ ID NO: 126955 - DNA, 26 bp, Homo sapiens
ggcgggttctaggtcggggctggggc

SEQ ID NO: 126956 - DNA, 26 bp, Homo sapiens
gcgggttctaggtcggggctggggcc

SEQ ID NO: 126957 - DNA, 26 bp, Homo sapiens
cgggttctaggtcggggctggggccc

SEQ ID NO: 126958 - DNA, 26 bp, Homo sapiens
gggttctaggtcggggctggggcccg

SEQ ID NO: 126959 - DNA, 26 bp, Homo sapiens
ggttctaggtcggggctggggcccgg

SEQ ID NO: 126960 - DNA, 26 bp, Homo sapiens
gttctaggtcggggctggggcccggg

SEQ ID NO: 126961 - DNA, 26 bp, Homo sapiens
ttctaggtcggggctggggcccgggg

SEQ ID NO: 126962 - DNA, 26 bp, Homo sapiens
tctaggtcggggctggggcccgggga

SEQ ID NO: 126963 - DNA, 26 bp, Homo sapiens
ctaggtcggggctggggcccggggaa

SEQ ID NO: 126964 - DNA, 26 bp, Homo sapiens
taggtcggggctggggcccggggaag

SEQ ID NO: 126965 - DNA, 26 bp, Homo sapiens
aggtcggggctggggcccggggaagc

SEQ ID NO: 126966 - DNA, 26 bp, Homo sapiens
ggtcggggctggggcccggggaagcc

SEQ ID NO: 126967 - DNA, 26 bp, Homo sapiens
gtcggggctggggcccggggaagccc

SEQ ID NO: 126968 - DNA, 26 bp, Homo sapiens
tcggggctggggcccggggaagcccc

SEQ ID NO: 126969 - DNA, 26 bp, Homo sapiens
cggggctggggcccggggaagccccc

SEQ ID NO: 126970 - DNA, 26 bp, Homo sapiens
ggggctggggcccggggaagccccca

SEQ ID NO: 126971 - DNA, 26 bp, Homo sapiens
gggctggggcccggggaagcccccag

SEQ ID NO: 126972 - DNA, 26 bp, Homo sapiens
ggctggggcccggggaagcccccagg

SEQ ID NO: 126973 - DNA, 26 bp, Homo sapiens
gctggggcccggggaagcccccaggg

SEQ ID NO: 126974 - DNA, 26 bp, Homo sapiens
ctggggcccggggaagcccccagggc

SEQ ID NO: 126975 - DNA, 26 bp, Homo sapiens
tggggcccggggaagcccccagggct

SEQ ID NO: 126976 - DNA, 26 bp, Homo sapiens
ggggcccggggaagcccccagggctt

SEQ ID NO: 126977 - DNA, 26 bp, Homo sapiens
gggcccggggaagcccccagggctta

SEQ ID NO: 126978 - DNA, 26 bp, Homo sapiens
ggcccggggaagcccccagggcttag

SEQ ID NO: 126979 - DNA, 26 bp, Homo sapiens
gcccggggaagcccccagggcttaga

SEQ ID NO: 126980 - DNA, 26 bp, Homo sapiens
cccggggaagcccccagggcttagaa

SEQ ID NO: 126981 - DNA, 26 bp, Homo sapiens
ccggggaagcccccagggcttagaag

SEQ ID NO: 126982 - DNA, 26 bp, Homo sapiens
cggggaagcccccagggcttagaaga

SEQ ID NO: 126983 - DNA, 26 bp, Homo sapiens
ggggaagcccccagggcttagaagat

SEQ ID NO: 126984 - DNA, 26 bp, Homo sapiens
gggaagcccccagggcttagaagata

SEQ ID NO: 126985 - DNA, 26 bp, Homo sapiens
ggaagcccccagggcttagaagatac

SEQ ID NO: 126986 - DNA, 26 bp, Homo sapiens
gaagcccccagggcttagaagatact

SEQ ID NO: 126987 - DNA, 26 bp, Homo sapiens
aagcccccagggcttagaagatactg

SEQ ID NO: 126988 - DNA, 26 bp, Homo sapiens
agcccccagggcttagaagatactgc

SEQ ID NO: 126989 - DNA, 26 bp, Homo sapiens
gcccccagggcttagaagatactgct

SEQ ID NO: 126990 - DNA, 26 bp, Homo sapiens
cccccagggcttagaagatactgctg

SEQ ID NO: 126991 - DNA, 26 bp, Homo sapiens
ccccagggcttagaagatactgctgt

SEQ ID NO: 126992 - DNA, 26 bp, Homo sapiens
cccagggcttagaagatactgctgtt

SEQ ID NO: 126993 - DNA, 26 bp, Homo sapiens
ccagggcttagaagatactgctgttt

SEQ ID NO: 126994 - DNA, 26 bp, Homo sapiens
cagggcttagaagatactgctgtttc

SEQ ID NO: 126995 - DNA, 26 bp, Homo sapiens
agggcttagaagatactgctgtttca

SEQ ID NO: 126996 - DNA, 26 bp, Homo sapiens
gggcttagaagatactgctgtttcag

SEQ ID NO: 126997 - DNA, 26 bp, Homo sapiens
ggcttagaagatactgctgtttcagt

SEQ ID NO: 126998 - DNA, 26 bp, Homo sapiens
gcttagaagatactgctgtttcagtc

SEQ ID NO: 126999 - DNA, 26 bp, Homo sapiens
cttagaagatactgctgtttcagtca

SEQ ID NO: 127000 - DNA, 26 bp, Homo sapiens
ttagaagatactgctgtttcagtcaa

SEQ ID NO: 127001 - DNA, 26 bp, Homo sapiens
tagaagatactgctgtttcagtcaaa

SEQ ID NO: 127002 - DNA, 26 bp, Homo sapiens
agaagatactgctgtttcagtcaaag

SEQ ID NO: 127003 - DNA, 26 bp, Homo sapiens
gaagatactgctgtttcagtcaaagg

SEQ ID NO: 127004 - DNA, 26 bp, Homo sapiens
aagatactgctgtttcagtcaaaggc

SEQ ID NO: 127005 - DNA, 26 bp, Homo sapiens
agatactgctgtttcagtcaaaggca

SEQ ID NO: 127006 - DNA, 26 bp, Homo sapiens
gatactgctgtttcagtcaaaggcag

SEQ ID NO: 127007 - DNA, 26 bp, Homo sapiens
atactgctgtttcagtcaaaggcagg

SEQ ID NO: 127008 - DNA, 26 bp, Homo sapiens
tactgctgtttcagtcaaaggcagga

SEQ ID NO: 127009 - DNA, 26 bp, Homo sapiens
actgctgtttcagtcaaaggcaggaa

SEQ ID NO: 127010 - DNA, 26 bp, Homo sapiens
ctgctgtttcagtcaaaggcaggaaa

SEQ ID NO: 127011 - DNA, 26 bp, Homo sapiens
tgctgtttcagtcaaaggcaggaaag

SEQ ID NO: 127012 - DNA, 26 bp, Homo sapiens
gctgtttcagtcaaaggcaggaaagg

SEQ ID NO: 127013 - DNA, 26 bp, Homo sapiens
ctgtttcagtcaaaggcaggaaaggc

SEQ ID NO: 127014 - DNA, 26 bp, Homo sapiens
tgtttcagtcaaaggcaggaaaggct

SEQ ID NO: 127015 - DNA, 26 bp, Homo sapiens
gtttcagtcaaaggcaggaaaggctg

SEQ ID NO: 127016 - DNA, 26 bp, Homo sapiens
tttcagtcaaaggcaggaaaggctga

SEQ ID NO: 127017 - DNA, 26 bp, Homo sapiens
ttcagtcaaaggcaggaaaggctgag

SEQ ID NO: 127018 - DNA, 26 bp, Homo sapiens
tcagtcaaaggcaggaaaggctgagg

SEQ ID NO: 127019 - DNA, 26 bp, Homo sapiens
cagtcaaaggcaggaaaggctgaggc

SEQ ID NO: 127020 - DNA, 26 bp, Homo sapiens
agtcaaaggcaggaaaggctgaggct

SEQ ID NO: 127021 - DNA, 26 bp, Homo sapiens
gtcaaaggcaggaaaggctgaggctc

SEQ ID NO: 127022 - DNA, 26 bp, Homo sapiens
tcaaaggcaggaaaggctgaggctca

SEQ ID NO: 127023 - DNA, 26 bp, Homo sapiens
caaaggcaggaaaggctgaggctcag

SEQ ID NO: 127024 - DNA, 26 bp, Homo sapiens
aaaggcaggaaaggctgaggctcaga

SEQ ID NO: 127025 - DNA, 26 bp, Homo sapiens
aaggcaggaaaggctgaggctcagag

SEQ ID NO: 127026 - DNA, 26 bp, Homo sapiens
aggcaggaaaggctgaggctcagaga

SEQ ID NO: 127027 - DNA, 26 bp, Homo sapiens
ggcaggaaaggctgaggctcagagat

SEQ ID NO: 127028 - DNA, 26 bp, Homo sapiens
gcaggaaaggctgaggctcagagatg

SEQ ID NO: 127029 - DNA, 26 bp, Homo sapiens
caggaaaggctgaggctcagagatga

SEQ ID NO: 127030 - DNA, 26 bp, Homo sapiens
aggaaaggctgaggctcagagatgat

SEQ ID NO: 127031 - DNA, 26 bp, Homo sapiens
ggaaaggctgaggctcagagatgatg

SEQ ID NO: 127032 - DNA, 26 bp, Homo sapiens
gaaaggctgaggctcagagatgatgc

SEQ ID NO: 127033 - DNA, 26 bp, Homo sapiens
aaaggctgaggctcagagatgatgct

SEQ ID NO: 127034 - DNA, 26 bp, Homo sapiens
aaggctgaggctcagagatgatgctg

SEQ ID NO: 127035 - DNA, 26 bp, Homo sapiens
aggctgaggctcagagatgatgctgg

SEQ ID NO: 127036 - DNA, 26 bp, Homo sapiens
ggctgaggctcagagatgatgctgga

SEQ ID NO: 127037 - DNA, 26 bp, Homo sapiens
gctgaggctcagagatgatgctggac

SEQ ID NO: 127038 - DNA, 26 bp, Homo sapiens
ctgaggctcagagatgatgctggaca

SEQ ID NO: 127039 - DNA, 26 bp, Homo sapiens
tgaggctcagagatgatgctggacag

SEQ ID NO: 127040 - DNA, 26 bp, Homo sapiens
gaggctcagagatgatgctggacagt

SEQ ID NO: 127041 - DNA, 26 bp, Homo sapiens
aggctcagagatgatgctggacagtc

SEQ ID NO: 127042 - DNA, 26 bp, Homo sapiens
ggctcagagatgatgctggacagtca

SEQ ID NO: 127043 - DNA, 26 bp, Homo sapiens
gctcagagatgatgctggacagtcaa

SEQ ID NO: 127044 - DNA, 26 bp, Homo sapiens
ctcagagatgatgctggacagtcaag

SEQ ID NO: 127045 - DNA, 26 bp, Homo sapiens
tcagagatgatgctggacagtcaagt

SEQ ID NO: 127046 - DNA, 26 bp, Homo sapiens
cagagatgatgctggacagtcaagta

SEQ ID NO: 127047 - DNA, 26 bp, Homo sapiens
agagatgatgctggacagtcaagtat

SEQ ID NO: 127048 - DNA, 26 bp, Homo sapiens
gagatgatgctggacagtcaagtatg

SEQ ID NO: 127049 - DNA, 26 bp, Homo sapiens
agatgatgctggacagtcaagtatga

SEQ ID NO: 127050 - DNA, 26 bp, Homo sapiens
gatgatgctggacagtcaagtatgat

SEQ ID NO: 127051 - DNA, 26 bp, Homo sapiens
atgatgctggacagtcaagtatgatg

SEQ ID NO: 127052 - DNA, 26 bp, Homo sapiens
tgatgctggacagtcaagtatgatga

SEQ ID NO: 127053 - DNA, 26 bp, Homo sapiens
gatgctggacagtcaagtatgatgag

SEQ ID NO: 127054 - DNA, 26 bp, Homo sapiens
atgctggacagtcaagtatgatgagg

SEQ ID NO: 127055 - DNA, 26 bp, Homo sapiens
tgctggacagtcaagtatgatgaggt

SEQ ID NO: 127056 - DNA, 26 bp, Homo sapiens
gctggacagtcaagtatgatgaggtc

SEQ ID NO: 127057 - DNA, 26 bp, Homo sapiens
ctggacagtcaagtatgatgaggtct

SEQ ID NO: 127058 - DNA, 26 bp, Homo sapiens
tggacagtcaagtatgatgaggtctc

SEQ ID NO: 127059 - DNA, 26 bp, Homo sapiens
ggacagtcaagtatgatgaggtctca

SEQ ID NO: 127060 - DNA, 26 bp, Homo sapiens
gacagtcaagtatgatgaggtctcat

SEQ ID NO: 127061 - DNA, 26 bp, Homo sapiens
acagtcaagtatgatgaggtctcatc

SEQ ID NO: 127062 - DNA, 26 bp, Homo sapiens
cagtcaagtatgatgaggtctcatct

SEQ ID NO: 127063 - DNA, 26 bp, Homo sapiens
agtcaagtatgatgaggtctcatctc

SEQ ID NO: 127064 - DNA, 26 bp, Homo sapiens
gtcaagtatgatgaggtctcatctca

SEQ ID NO: 127065 - DNA, 26 bp, Homo sapiens
tcaagtatgatgaggtctcatctcac

SEQ ID NO: 127066 - DNA, 26 bp, Homo sapiens
caagtatgatgaggtctcatctcact

SEQ ID NO: 127067 - DNA, 26 bp, Homo sapiens
aagtatgatgaggtctcatctcactc

SEQ ID NO: 127068 - DNA, 26 bp, Homo sapiens
agtatgatgaggtctcatctcactcc

SEQ ID NO: 127069 - DNA, 26 bp, Homo sapiens
gtatgatgaggtctcatctcactcct

SEQ ID NO: 127070 - DNA, 26 bp, Homo sapiens
tatgatgaggtctcatctcactcctg

SEQ ID NO: 127071 - DNA, 26 bp, Homo sapiens
atgatgaggtctcatctcactcctga

SEQ ID NO: 127072 - DNA, 26 bp, Homo sapiens
tgatgaggtctcatctcactcctgaa

SEQ ID NO: 127073 - DNA, 26 bp, Homo sapiens
gatgaggtctcatctcactcctgaag

SEQ ID NO: 127074 - DNA, 26 bp, Homo sapiens
atgaggtctcatctcactcctgaagg

SEQ ID NO: 127075 - DNA, 26 bp, Homo sapiens
tgaggtctcatctcactcctgaagga

SEQ ID NO: 127076 - DNA, 26 bp, Homo sapiens
gaggtctcatctcactcctgaaggat

SEQ ID NO: 127077 - DNA, 26 bp, Homo sapiens
aggtctcatctcactcctgaaggatg

SEQ ID NO: 127078 - DNA, 26 bp, Homo sapiens
ggtctcatctcactcctgaaggatgc

SEQ ID NO: 127079 - DNA, 26 bp, Homo sapiens
gtctcatctcactcctgaaggatgcc

SEQ ID NO: 127080 - DNA, 26 bp, Homo sapiens
tctcatctcactcctgaaggatgccc

SEQ ID NO: 127081 - DNA, 26 bp, Homo sapiens
ctcatctcactcctgaaggatgccct

SEQ ID NO: 127082 - DNA, 26 bp, Homo sapiens
tcatctcactcctgaaggatgccctc

SEQ ID NO: 127083 - DNA, 26 bp, Homo sapiens
catctcactcctgaaggatgccctcc

SEQ ID NO: 127084 - DNA, 26 bp, Homo sapiens
atctcactcctgaaggatgccctcca

SEQ ID NO: 127085 - DNA, 26 bp, Homo sapiens
tctcactcctgaaggatgccctccat

SEQ ID NO: 127086 - DNA, 26 bp, Homo sapiens
ctcactcctgaaggatgccctccatc

SEQ ID NO: 127087 - DNA, 26 bp, Homo sapiens
tcactcctgaaggatgccctccatct

SEQ ID NO: 127088 - DNA, 26 bp, Homo sapiens
cactcctgaaggatgccctccatctc

SEQ ID NO: 127089 - DNA, 26 bp, Homo sapiens
actcctgaaggatgccctccatctct

SEQ ID NO: 127090 - DNA, 26 bp, Homo sapiens
ctcctgaaggatgccctccatctctt

SEQ ID NO: 127091 - DNA, 26 bp, Homo sapiens
tcctgaaggatgccctccatctcttc

SEQ ID NO: 127092 - DNA, 26 bp, Homo sapiens
cctgaaggatgccctccatctcttcc

SEQ ID NO: 127093 - DNA, 26 bp, Homo sapiens
ctgaaggatgccctccatctcttcct

SEQ ID NO: 127094 - DNA, 26 bp, Homo sapiens
tgaaggatgccctccatctcttcctg

SEQ ID NO: 127095 - DNA, 26 bp, Homo sapiens
gaaggatgccctccatctcttcctga

SEQ ID NO: 127096 - DNA, 26 bp, Homo sapiens
aaggatgccctccatctcttcctgac

SEQ ID NO: 127097 - DNA, 26 bp, Homo sapiens
aggatgccctccatctcttcctgact

SEQ ID NO: 127098 - DNA, 26 bp, Homo sapiens
ggatgccctccatctcttcctgactt

SEQ ID NO: 127099 - DNA, 26 bp, Homo sapiens
gatgccctccatctcttcctgacttc

SEQ ID NO: 127100 - DNA, 26 bp, Homo sapiens
atgccctccatctcttcctgacttca

SEQ ID NO: 127101 - DNA, 26 bp, Homo sapiens
tgccctccatctcttcctgacttcag

SEQ ID NO: 127102 - DNA, 26 bp, Homo sapiens
gccctccatctcttcctgacttcagg

SEQ ID NO: 127103 - DNA, 26 bp, Homo sapiens
ccctccatctcttcctgacttcaggt

SEQ ID NO: 127104 - DNA, 26 bp, Homo sapiens
cctccatctcttcctgacttcaggtg

SEQ ID NO: 127105 - DNA, 26 bp, Homo sapiens
ctccatctcttcctgacttcaggtgg

SEQ ID NO: 127106 - DNA, 26 bp, Homo sapiens
tccatctcttcctgacttcaggtggc

SEQ ID NO: 127107 - DNA, 26 bp, Homo sapiens
ccatctcttcctgacttcaggtggct

SEQ ID NO: 127108 - DNA, 26 bp, Homo sapiens
catctcttcctgacttcaggtggctt

SEQ ID NO: 127109 - DNA, 26 bp, Homo sapiens
atctcttcctgacttcaggtggcttc

SEQ ID NO: 127110 - DNA, 26 bp, Homo sapiens
tctcttcctgacttcaggtggcttcc

SEQ ID NO: 127111 - DNA, 26 bp, Homo sapiens
ctcttcctgacttcaggtggcttcca

SEQ ID NO: 127112 - DNA, 26 bp, Homo sapiens
tcttcctgacttcaggtggcttccac

SEQ ID NO: 127113 - DNA, 26 bp, Homo sapiens
cttcctgacttcaggtggcttccaca

SEQ ID NO: 127114 - DNA, 26 bp, Homo sapiens
ttcctgacttcaggtggcttccacag

SEQ ID NO: 127115 - DNA, 26 bp, Homo sapiens
tcctgacttcaggtggcttccacaga

SEQ ID NO: 127116 - DNA, 26 bp, Homo sapiens
cctgacttcaggtggcttccacagaa

SEQ ID NO: 127117 - DNA, 26 bp, Homo sapiens
ctgacttcaggtggcttccacagaac

SEQ ID NO: 127118 - DNA, 26 bp, Homo sapiens
tgacttcaggtggcttccacagaaca

SEQ ID NO: 127119 - DNA, 26 bp, Homo sapiens
gacttcaggtggcttccacagaacag

SEQ ID NO: 127120 - DNA, 26 bp, Homo sapiens
acttcaggtggcttccacagaacaga

SEQ ID NO: 127121 - DNA, 26 bp, Homo sapiens
cttcaggtggcttccacagaacagat

SEQ ID NO: 127122 - DNA, 26 bp, Homo sapiens
ttcaggtggcttccacagaacagatt

SEQ ID NO: 127123 - DNA, 26 bp, Homo sapiens
tcaggtggcttccacagaacagattt

SEQ ID NO: 127124 - DNA, 26 bp, Homo sapiens
caggtggcttccacagaacagattta

SEQ ID NO: 127125 - DNA, 26 bp, Homo sapiens
aggtggcttccacagaacagatttat

SEQ ID NO: 127126 - DNA, 26 bp, Homo sapiens
ggtggcttccacagaacagatttata

SEQ ID NO: 127127 - DNA, 26 bp, Homo sapiens
gtggcttccacagaacagatttatat

SEQ ID NO: 127128 - DNA, 26 bp, Homo sapiens
tggcttccacagaacagatttatata

SEQ ID NO: 127129 - DNA, 26 bp, Homo sapiens
ggcttccacagaacagatttatataa

SEQ ID NO: 127130 - DNA, 26 bp, Homo sapiens
gcttccacagaacagatttatataac

SEQ ID NO: 127131 - DNA, 26 bp, Homo sapiens
cttccacagaacagatttatataacc

SEQ ID NO: 127132 - DNA, 26 bp, Homo sapiens
ttccacagaacagatttatataaccc

SEQ ID NO: 127133 - DNA, 26 bp, Homo sapiens
tccacagaacagatttatataacccc

SEQ ID NO: 127134 - DNA, 26 bp, Homo sapiens
ccacagaacagatttatataacccca

SEQ ID NO: 127135 - DNA, 26 bp, Homo sapiens
cacagaacagatttatataaccccaa

SEQ ID NO: 127136 - DNA, 26 bp, Homo sapiens
acagaacagatttatataaccccaaa

SEQ ID NO: 127137 - DNA, 26 bp, Homo sapiens
cagaacagatttatataaccccaaat

SEQ ID NO: 127138 - DNA, 26 bp, Homo sapiens
agaacagatttatataaccccaaata

SEQ ID NO: 127139 - DNA, 26 bp, Homo sapiens
gaacagatttatataaccccaaataa

SEQ ID NO: 127140 - DNA, 26 bp, Homo sapiens
aacagatttatataaccccaaataaa

SEQ ID NO: 127141 - DNA, 26 bp, Homo sapiens
acagatttatataaccccaaataaac

SEQ ID NO: 127142 - DNA, 26 bp, Homo sapiens
cagatttatataaccccaaataaaca

SEQ ID NO: 127143 - DNA, 26 bp, Homo sapiens
agatttatataaccccaaataaacac

SEQ ID NO: 127144 - DNA, 26 bp, Homo sapiens
gatttatataaccccaaataaacaca

SEQ ID NO: 127145 - DNA, 26 bp, Homo sapiens
atttatataaccccaaataaacacac

SEQ ID NO: 127146 - DNA, 26 bp, Homo sapiens
tttatataaccccaaataaacacaca

SEQ ID NO: 127147 - DNA, 26 bp, Homo sapiens
ttatataaccccaaataaacacacat

SEQ ID NO: 127148 - DNA, 26 bp, Homo sapiens
tatataaccccaaataaacacacatt

SEQ ID NO: 127149 - DNA, 26 bp, Homo sapiens
atataaccccaaataaacacacattc

SEQ ID NO: 127150 - DNA, 26 bp, Homo sapiens
tataaccccaaataaacacacattcc

SEQ ID NO: 127151 - DNA, 26 bp, Homo sapiens
ataaccccaaataaacacacattcca

SEQ ID NO: 127152 - DNA, 26 bp, Homo sapiens
taaccccaaataaacacacattccag

SEQ ID NO: 127153 - DNA, 26 bp, Homo sapiens
aaccccaaataaacacacattccagg

SEQ ID NO: 127154 - DNA, 26 bp, Homo sapiens
accccaaataaacacacattccagga

SEQ ID NO: 127155 - DNA, 26 bp, Homo sapiens
ccccaaataaacacacattccaggat

SEQ ID NO: 127156 - DNA, 26 bp, Homo sapiens
cccaaataaacacacattccaggatc

SEQ ID NO: 127157 - DNA, 26 bp, Homo sapiens
ccaaataaacacacattccaggatca

SEQ ID NO: 127158 - DNA, 26 bp, Homo sapiens
caaataaacacacattccaggatcaa

SEQ ID NO: 127159 - DNA, 26 bp, Homo sapiens
aaataaacacacattccaggatcaat

SEQ ID NO: 127160 - DNA, 26 bp, Homo sapiens
aataaacacacattccaggatcaatg

SEQ ID NO: 127161 - DNA, 26 bp, Homo sapiens
ataaacacacattccaggatcaatgt

SEQ ID NO: 127162 - DNA, 26 bp, Homo sapiens
taaacacacattccaggatcaatgtg

SEQ ID NO: 127163 - DNA, 26 bp, Homo sapiens
aaacacacattccaggatcaatgtgg

SEQ ID NO: 127164 - DNA, 26 bp, Homo sapiens
aacacacattccaggatcaatgtggc

SEQ ID NO: 127165 - DNA, 26 bp, Homo sapiens
acacacattccaggatcaatgtggca

SEQ ID NO: 127166 - DNA, 26 bp, Homo sapiens
cacacattccaggatcaatgtggcag

SEQ ID NO: 127167 - DNA, 26 bp, Homo sapiens
acacattccaggatcaatgtggcaga

SEQ ID NO: 127168 - DNA, 26 bp, Homo sapiens
cacattccaggatcaatgtggcagac

SEQ ID NO: 127169 - DNA, 26 bp, Homo sapiens
acattccaggatcaatgtggcagaca

SEQ ID NO: 127170 - DNA, 26 bp, Homo sapiens
cattccaggatcaatgtggcagacac

SEQ ID NO: 127171 - DNA, 26 bp, Homo sapiens
attccaggatcaatgtggcagacacc

SEQ ID NO: 127172 - DNA, 26 bp, Homo sapiens
ttccaggatcaatgtggcagacacct

SEQ ID NO: 127173 - DNA, 26 bp, Homo sapiens
tccaggatcaatgtggcagacacctt

SEQ ID NO: 127174 - DNA, 26 bp, Homo sapiens
ccaggatcaatgtggcagacaccttc

SEQ ID NO: 127175 - DNA, 26 bp, Homo sapiens
caggatcaatgtggcagacaccttcc

SEQ ID NO: 127176 - DNA, 26 bp, Homo sapiens
aggatcaatgtggcagacaccttcca

SEQ ID NO: 127177 - DNA, 26 bp, Homo sapiens
ggatcaatgtggcagacaccttccaa

SEQ ID NO: 127178 - DNA, 26 bp, Homo sapiens
gatcaatgtggcagacaccttccaaa

SEQ ID NO: 127179 - DNA, 26 bp, Homo sapiens
atcaatgtggcagacaccttccaaag

SEQ ID NO: 127180 - DNA, 26 bp, Homo sapiens
tcaatgtggcagacaccttccaaagt

SEQ ID NO: 127181 - DNA, 26 bp, Homo sapiens
caatgtggcagacaccttccaaagtt

SEQ ID NO: 127182 - DNA, 26 bp, Homo sapiens
aatgtggcagacaccttccaaagttt

SEQ ID NO: 127183 - DNA, 26 bp, Homo sapiens
atgtggcagacaccttccaaagtttt

SEQ ID NO: 127184 - DNA, 26 bp, Homo sapiens
tgtggcagacaccttccaaagttttc

SEQ ID NO: 127185 - DNA, 26 bp, Homo sapiens
gtggcagacaccttccaaagttttct

SEQ ID NO: 127186 - DNA, 26 bp, Homo sapiens
tggcagacaccttccaaagttttctt

SEQ ID NO: 127187 - DNA, 26 bp, Homo sapiens
ggcagacaccttccaaagttttcttc

SEQ ID NO: 127188 - DNA, 26 bp, Homo sapiens
gcagacaccttccaaagttttcttcc

SEQ ID NO: 127189 - DNA, 26 bp, Homo sapiens
cagacaccttccaaagttttcttccg

SEQ ID NO: 127190 - DNA, 26 bp, Homo sapiens
agacaccttccaaagttttcttccgt

SEQ ID NO: 127191 - DNA, 26 bp, Homo sapiens
gacaccttccaaagttttcttccgtt

SEQ ID NO: 127192 - DNA, 26 bp, Homo sapiens
acaccttccaaagttttcttccgttt

SEQ ID NO: 127193 - DNA, 26 bp, Homo sapiens
caccttccaaagttttcttccgtttt

SEQ ID NO: 127194 - DNA, 26 bp, Homo sapiens
accttccaaagttttcttccgttttc

SEQ ID NO: 127195 - DNA, 26 bp, Homo sapiens
ccttccaaagttttcttccgttttcg

SEQ ID NO: 127196 - DNA, 26 bp, Homo sapiens
cttccaaagttttcttccgttttcgt

SEQ ID NO: 127197 - DNA, 26 bp, Homo sapiens
ttccaaagttttcttccgttttcgtg

SEQ ID NO: 127198 - DNA, 26 bp, Homo sapiens
tccaaagttttcttccgttttcgtgt

SEQ ID NO: 127199 - DNA, 26 bp, Homo sapiens
ccaaagttttcttccgttttcgtgtg

SEQ ID NO: 127200 - DNA, 26 bp, Homo sapiens
caaagttttcttccgttttcgtgtga

SEQ ID NO: 127201 - DNA, 26 bp, Homo sapiens
aaagttttcttccgttttcgtgtgat

SEQ ID NO: 127202 - DNA, 26 bp, Homo sapiens
aagttttcttccgttttcgtgtgatg

SEQ ID NO: 127203 - DNA, 26 bp, Homo sapiens
agttttcttccgttttcgtgtgatgt

SEQ ID NO: 127204 - DNA, 26 bp, Homo sapiens
gttttcttccgttttcgtgtgatgtc

SEQ ID NO: 127205 - DNA, 26 bp, Homo sapiens
ttttcttccgttttcgtgtgatgtct

SEQ ID NO: 127206 - DNA, 26 bp, Homo sapiens
tttcttccgttttcgtgtgatgtctc

SEQ ID NO: 127207 - DNA, 26 bp, Homo sapiens
ttcttccgttttcgtgtgatgtctca

SEQ ID NO: 127208 - DNA, 26 bp, Homo sapiens
tcttccgttttcgtgtgatgtctcaa

SEQ ID NO: 127209 - DNA, 26 bp, Homo sapiens
cttccgttttcgtgtgatgtctcaaa

SEQ ID NO: 127210 - DNA, 26 bp, Homo sapiens
ttccgttttcgtgtgatgtctcaaaa

SEQ ID NO: 127211 - DNA, 26 bp, Homo sapiens
tccgttttcgtgtgatgtctcaaaag

SEQ ID NO: 127212 - DNA, 26 bp, Homo sapiens
ccgttttcgtgtgatgtctcaaaaga

SEQ ID NO: 127213 - DNA, 26 bp, Homo sapiens
cgttttcgtgtgatgtctcaaaagac

SEQ ID NO: 127214 - DNA, 26 bp, Homo sapiens
gttttcgtgtgatgtctcaaaagact

SEQ ID NO: 127215 - DNA, 26 bp, Homo sapiens
ttttcgtgtgatgtctcaaaagacta

SEQ ID NO: 127216 - DNA, 26 bp, Homo sapiens
tttcgtgtgatgtctcaaaagactag

SEQ ID NO: 127217 - DNA, 26 bp, Homo sapiens
ttcgtgtgatgtctcaaaagactagc

SEQ ID NO: 127218 - DNA, 26 bp, Homo sapiens
tcgtgtgatgtctcaaaagactagcc

SEQ ID NO: 127219 - DNA, 26 bp, Homo sapiens
cgtgtgatgtctcaaaagactagccc

SEQ ID NO: 127220 - DNA, 26 bp, Homo sapiens
gtgtgatgtctcaaaagactagcccc

SEQ ID NO: 127221 - DNA, 26 bp, Homo sapiens
tgtgatgtctcaaaagactagccccc

SEQ ID NO: 127222 - DNA, 26 bp, Homo sapiens
gtgatgtctcaaaagactagccccct

SEQ ID NO: 127223 - DNA, 26 bp, Homo sapiens
tgatgtctcaaaagactagccccctt

SEQ ID NO: 127224 - DNA, 26 bp, Homo sapiens
gatgtctcaaaagactagccccctta

SEQ ID NO: 127225 - DNA, 26 bp, Homo sapiens
atgtctcaaaagactagcccccttaa

SEQ ID NO: 127226 - DNA, 26 bp, Homo sapiens
tgtctcaaaagactagcccccttaac

SEQ ID NO: 127227 - DNA, 26 bp, Homo sapiens
gtctcaaaagactagcccccttaacg

SEQ ID NO: 127228 - DNA, 26 bp, Homo sapiens
tctcaaaagactagcccccttaacga

SEQ ID NO: 127229 - DNA, 26 bp, Homo sapiens
ctcaaaagactagcccccttaacgaa

SEQ ID NO: 127230 - DNA, 26 bp, Homo sapiens
tcaaaagactagcccccttaacgaac

SEQ ID NO: 127231 - DNA, 26 bp, Homo sapiens
caaaagactagcccccttaacgaacc

SEQ ID NO: 127232 - DNA, 26 bp, Homo sapiens
aaaagactagcccccttaacgaacca

SEQ ID NO: 127233 - DNA, 26 bp, Homo sapiens
aaagactagcccccttaacgaaccac

SEQ ID NO: 127234 - DNA, 26 bp, Homo sapiens
aagactagcccccttaacgaaccact

SEQ ID NO: 127235 - DNA, 26 bp, Homo sapiens
agactagcccccttaacgaaccactt

SEQ ID NO: 127236 - DNA, 26 bp, Homo sapiens
gactagcccccttaacgaaccacttt

SEQ ID NO: 127237 - DNA, 26 bp, Homo sapiens
actagcccccttaacgaaccactttt

SEQ ID NO: 127238 - DNA, 26 bp, Homo sapiens
ctagcccccttaacgaaccacttttt

SEQ ID NO: 127239 - DNA, 26 bp, Homo sapiens
tagcccccttaacgaaccactttttc

SEQ ID NO: 127240 - DNA, 26 bp, Homo sapiens
agcccccttaacgaaccactttttca

SEQ ID NO: 127241 - DNA, 26 bp, Homo sapiens
gcccccttaacgaaccactttttcag

SEQ ID NO: 127242 - DNA, 26 bp, Homo sapiens
cccccttaacgaaccactttttcagg

SEQ ID NO: 127243 - DNA, 26 bp, Homo sapiens
ccccttaacgaaccactttttcagga

SEQ ID NO: 127244 - DNA, 26 bp, Homo sapiens
cccttaacgaaccactttttcaggaa

SEQ ID NO: 127245 - DNA, 26 bp, Homo sapiens
ccttaacgaaccactttttcaggaac

SEQ ID NO: 127246 - DNA, 26 bp, Homo sapiens
cttaacgaaccactttttcaggaact

SEQ ID NO: 127247 - DNA, 26 bp, Homo sapiens
ttaacgaaccactttttcaggaactg

SEQ ID NO: 127248 - DNA, 26 bp, Homo sapiens
taacgaaccactttttcaggaactgg

SEQ ID NO: 127249 - DNA, 26 bp, Homo sapiens
aacgaaccactttttcaggaactggt

SEQ ID NO: 127250 - DNA, 26 bp, Homo sapiens
acgaaccactttttcaggaactggta

SEQ ID NO: 127251 - DNA, 26 bp, Homo sapiens
cgaaccactttttcaggaactggtaa

SEQ ID NO: 127252 - DNA, 26 bp, Homo sapiens
gaaccactttttcaggaactggtaaa

SEQ ID NO: 127253 - DNA, 26 bp, Homo sapiens
aaccactttttcaggaactggtaaaa

SEQ ID NO: 127254 - DNA, 26 bp, Homo sapiens
accactttttcaggaactggtaaaat

SEQ ID NO: 127255 - DNA, 26 bp, Homo sapiens
ccactttttcaggaactggtaaaatt

SEQ ID NO: 127256 - DNA, 26 bp, Homo sapiens
cactttttcaggaactggtaaaattt

SEQ ID NO: 127257 - DNA, 26 bp, Homo sapiens
actttttcaggaactggtaaaatttc

SEQ ID NO: 127258 - DNA, 26 bp, Homo sapiens
ctttttcaggaactggtaaaatttcc

SEQ ID NO: 127259 - DNA, 26 bp, Homo sapiens
tttttcaggaactggtaaaatttccc

SEQ ID NO: 127260 - DNA, 26 bp, Homo sapiens
ttttcaggaactggtaaaatttccct

SEQ ID NO: 127261 - DNA, 26 bp, Homo sapiens
tttcaggaactggtaaaatttccctc

SEQ ID NO: 127262 - DNA, 26 bp, Homo sapiens
ttcaggaactggtaaaatttccctca

SEQ ID NO: 127263 - DNA, 26 bp, Homo sapiens
tcaggaactggtaaaatttccctcaa

SEQ ID NO: 127264 - DNA, 26 bp, Homo sapiens
caggaactggtaaaatttccctcaac

SEQ ID NO: 127265 - DNA, 26 bp, Homo sapiens
aggaactggtaaaatttccctcaact

SEQ ID NO: 127266 - DNA, 26 bp, Homo sapiens
ggaactggtaaaatttccctcaactg

SEQ ID NO: 127267 - DNA, 26 bp, Homo sapiens
gaactggtaaaatttccctcaactgt

SEQ ID NO: 127268 - DNA, 26 bp, Homo sapiens
aactggtaaaatttccctcaactgta

SEQ ID NO: 127269 - DNA, 26 bp, Homo sapiens
actggtaaaatttccctcaactgtaa

SEQ ID NO: 127270 - DNA, 26 bp, Homo sapiens
ctggtaaaatttccctcaactgtaaa

SEQ ID NO: 127271 - DNA, 26 bp, Homo sapiens
tggtaaaatttccctcaactgtaaaa

SEQ ID NO: 127272 - DNA, 26 bp, Homo sapiens
ggtaaaatttccctcaactgtaaaat

SEQ ID NO: 127273 - DNA, 26 bp, Homo sapiens
gtaaaatttccctcaactgtaaaatc

SEQ ID NO: 127274 - DNA, 26 bp, Homo sapiens
taaaatttccctcaactgtaaaatct

SEQ ID NO: 127275 - DNA, 26 bp, Homo sapiens
aaaatttccctcaactgtaaaatctg

SEQ ID NO: 127276 - DNA, 26 bp, Homo sapiens
aaatttccctcaactgtaaaatctgt

SEQ ID NO: 127277 - DNA, 26 bp, Homo sapiens
aatttccctcaactgtaaaatctgtg

SEQ ID NO: 127278 - DNA, 26 bp, Homo sapiens
atttccctcaactgtaaaatctgtgg

SEQ ID NO: 127279 - DNA, 26 bp, Homo sapiens
tttccctcaactgtaaaatctgtggg

SEQ ID NO: 127280 - DNA, 26 bp, Homo sapiens
ttccctcaactgtaaaatctgtgggt

SEQ ID NO: 127281 - DNA, 26 bp, Homo sapiens
tccctcaactgtaaaatctgtgggta

SEQ ID NO: 127282 - DNA, 26 bp, Homo sapiens
ccctcaactgtaaaatctgtgggtag

SEQ ID NO: 127283 - DNA, 26 bp, Homo sapiens
cctcaactgtaaaatctgtgggtaga

SEQ ID NO: 127284 - DNA, 26 bp, Homo sapiens
ctcaactgtaaaatctgtgggtagaa

SEQ ID NO: 127285 - DNA, 26 bp, Homo sapiens
tcaactgtaaaatctgtgggtagaac

SEQ ID NO: 127286 - DNA, 26 bp, Homo sapiens
caactgtaaaatctgtgggtagaact

SEQ ID NO: 127287 - DNA, 26 bp, Homo sapiens
aactgtaaaatctgtgggtagaactg

SEQ ID NO: 127288 - DNA, 26 bp, Homo sapiens
actgtaaaatctgtgggtagaactgt

SEQ ID NO: 127289 - DNA, 26 bp, Homo sapiens
ctgtaaaatctgtgggtagaactgtt

SEQ ID NO: 127290 - DNA, 26 bp, Homo sapiens
tgtaaaatctgtgggtagaactgttc

SEQ ID NO: 127291 - DNA, 26 bp, Homo sapiens
gtaaaatctgtgggtagaactgttct

SEQ ID NO: 127292 - DNA, 26 bp, Homo sapiens
taaaatctgtgggtagaactgttctc

SEQ ID NO: 127293 - DNA, 26 bp, Homo sapiens
aaaatctgtgggtagaactgttctcc

SEQ ID NO: 127294 - DNA, 26 bp, Homo sapiens
aaatctgtgggtagaactgttctccc

SEQ ID NO: 127295 - DNA, 26 bp, Homo sapiens
aatctgtgggtagaactgttctccct

SEQ ID NO: 127296 - DNA, 26 bp, Homo sapiens
atctgtgggtagaactgttctccctc

SEQ ID NO: 127297 - DNA, 26 bp, Homo sapiens
tctgtgggtagaactgttctccctct

SEQ ID NO: 127298 - DNA, 26 bp, Homo sapiens
ctgtgggtagaactgttctccctctt

SEQ ID NO: 127299 - DNA, 26 bp, Homo sapiens
tgtgggtagaactgttctccctcttt

SEQ ID NO: 127300 - DNA, 26 bp, Homo sapiens
gtgggtagaactgttctccctctttt

SEQ ID NO: 127301 - DNA, 26 bp, Homo sapiens
tgggtagaactgttctccctcttttt

SEQ ID NO: 127302 - DNA, 26 bp, Homo sapiens
gggtagaactgttctccctctttttc

SEQ ID NO: 127303 - DNA, 26 bp, Homo sapiens
ggtagaactgttctccctctttttca

SEQ ID NO: 127304 - DNA, 26 bp, Homo sapiens
gtagaactgttctccctctttttcat

SEQ ID NO: 127305 - DNA, 26 bp, Homo sapiens
tagaactgttctccctctttttcatc

SEQ ID NO: 127306 - DNA, 26 bp, Homo sapiens
agaactgttctccctctttttcatcg

SEQ ID NO: 127307 - DNA, 26 bp, Homo sapiens
gaactgttctccctctttttcatcgt

SEQ ID NO: 127308 - DNA, 26 bp, Homo sapiens
aactgttctccctctttttcatcgtc

SEQ ID NO: 127309 - DNA, 26 bp, Homo sapiens
actgttctccctctttttcatcgtca

SEQ ID NO: 127310 - DNA, 26 bp, Homo sapiens
ctgttctccctctttttcatcgtcac

SEQ ID NO: 127311 - DNA, 26 bp, Homo sapiens
tgttctccctctttttcatcgtcacc

SEQ ID NO: 127312 - DNA, 26 bp, Homo sapiens
gttctccctctttttcatcgtcacct

SEQ ID NO: 127313 - DNA, 26 bp, Homo sapiens
ttctccctctttttcatcgtcacctg

SEQ ID NO: 127314 - DNA, 26 bp, Homo sapiens
tctccctctttttcatcgtcacctgg

SEQ ID NO: 127315 - DNA, 26 bp, Homo sapiens
ctccctctttttcatcgtcacctgga

SEQ ID NO: 127316 - DNA, 26 bp, Homo sapiens
tccctctttttcatcgtcacctggac

SEQ ID NO: 127317 - DNA, 26 bp, Homo sapiens
ccctctttttcatcgtcacctggacc

SEQ ID NO: 127318 - DNA, 26 bp, Homo sapiens
cctctttttcatcgtcacctggacca

SEQ ID NO: 127319 - DNA, 26 bp, Homo sapiens
ctctttttcatcgtcacctggaccac

SEQ ID NO: 127320 - DNA, 26 bp, Homo sapiens
tctttttcatcgtcacctggaccact

SEQ ID NO: 127321 - DNA, 26 bp, Homo sapiens
ctttttcatcgtcacctggaccactg

SEQ ID NO: 127322 - DNA, 26 bp, Homo sapiens
tttttcatcgtcacctggaccactgc

SEQ ID NO: 127323 - DNA, 26 bp, Homo sapiens
ttttcatcgtcacctggaccactgcc

SEQ ID NO: 127324 - DNA, 26 bp, Homo sapiens
tttcatcgtcacctggaccactgccc

SEQ ID NO: 127325 - DNA, 26 bp, Homo sapiens
ttcatcgtcacctggaccactgccca

SEQ ID NO: 127326 - DNA, 26 bp, Homo sapiens
tcatcgtcacctggaccactgcccac

SEQ ID NO: 127327 - DNA, 26 bp, Homo sapiens
catcgtcacctggaccactgcccaca

SEQ ID NO: 127328 - DNA, 26 bp, Homo sapiens
atcgtcacctggaccactgcccacag

SEQ ID NO: 127329 - DNA, 26 bp, Homo sapiens
tcgtcacctggaccactgcccacagg

SEQ ID NO: 127330 - DNA, 26 bp, Homo sapiens
cgtcacctggaccactgcccacagga

SEQ ID NO: 127331 - DNA, 26 bp, Homo sapiens
gtcacctggaccactgcccacaggat

SEQ ID NO: 127332 - DNA, 26 bp, Homo sapiens
tcacctggaccactgcccacaggatg

SEQ ID NO: 127333 - DNA, 26 bp, Homo sapiens
cacctggaccactgcccacaggatgc

SEQ ID NO: 127334 - DNA, 26 bp, Homo sapiens
acctggaccactgcccacaggatgca

SEQ ID NO: 127335 - DNA, 26 bp, Homo sapiens
cctggaccactgcccacaggatgcag

SEQ ID NO: 127336 - DNA, 26 bp, Homo sapiens
ctggaccactgcccacaggatgcagt

SEQ ID NO: 127337 - DNA, 26 bp, Homo sapiens
tggaccactgcccacaggatgcagtc

SEQ ID NO: 127338 - DNA, 26 bp, Homo sapiens
ggaccactgcccacaggatgcagtcc

SEQ ID NO: 127339 - DNA, 26 bp, Homo sapiens
gaccactgcccacaggatgcagtcca

SEQ ID NO: 127340 - DNA, 26 bp, Homo sapiens
accactgcccacaggatgcagtccaa

SEQ ID NO: 127341 - DNA, 26 bp, Homo sapiens
ccactgcccacaggatgcagtccaat

SEQ ID NO: 127342 - DNA, 26 bp, Homo sapiens
cactgcccacaggatgcagtccaatc

SEQ ID NO: 127343 - DNA, 26 bp, Homo sapiens
actgcccacaggatgcagtccaatct

SEQ ID NO: 127344 - DNA, 26 bp, Homo sapiens
ctgcccacaggatgcagtccaatctc

SEQ ID NO: 127345 - DNA, 26 bp, Homo sapiens
tgcccacaggatgcagtccaatctct

SEQ ID NO: 127346 - DNA, 26 bp, Homo sapiens
gcccacaggatgcagtccaatctctg

SEQ ID NO: 127347 - DNA, 26 bp, Homo sapiens
cccacaggatgcagtccaatctctga

SEQ ID NO: 127348 - DNA, 26 bp, Homo sapiens
ccacaggatgcagtccaatctctgac

SEQ ID NO: 127349 - DNA, 26 bp, Homo sapiens
cacaggatgcagtccaatctctgacc

SEQ ID NO: 127350 - DNA, 26 bp, Homo sapiens
acaggatgcagtccaatctctgacct

SEQ ID NO: 127351 - DNA, 26 bp, Homo sapiens
caggatgcagtccaatctctgacctt

SEQ ID NO: 127352 - DNA, 26 bp, Homo sapiens
aggatgcagtccaatctctgaccttg

SEQ ID NO: 127353 - DNA, 26 bp, Homo sapiens
ggatgcagtccaatctctgaccttga

SEQ ID NO: 127354 - DNA, 26 bp, Homo sapiens
gatgcagtccaatctctgaccttgac

SEQ ID NO: 127355 - DNA, 26 bp, Homo sapiens
atgcagtccaatctctgaccttgact

SEQ ID NO: 127356 - DNA, 26 bp, Homo sapiens
tgcagtccaatctctgaccttgactt

SEQ ID NO: 127357 - DNA, 26 bp, Homo sapiens
gcagtccaatctctgaccttgacttt

SEQ ID NO: 127358 - DNA, 26 bp, Homo sapiens
cagtccaatctctgaccttgactttc

SEQ ID NO: 127359 - DNA, 26 bp, Homo sapiens
agtccaatctctgaccttgactttct

SEQ ID NO: 127360 - DNA, 26 bp, Homo sapiens
gtccaatctctgaccttgactttctg

SEQ ID NO: 127361 - DNA, 26 bp, Homo sapiens
tccaatctctgaccttgactttctgt

SEQ ID NO: 127362 - DNA, 26 bp, Homo sapiens
ccaatctctgaccttgactttctgtg

SEQ ID NO: 127363 - DNA, 26 bp, Homo sapiens
caatctctgaccttgactttctgtgg

SEQ ID NO: 127364 - DNA, 26 bp, Homo sapiens
aatctctgaccttgactttctgtggt

SEQ ID NO: 127365 - DNA, 26 bp, Homo sapiens
atctctgaccttgactttctgtggtc

SEQ ID NO: 127366 - DNA, 26 bp, Homo sapiens
tctctgaccttgactttctgtggtcc

SEQ ID NO: 127367 - DNA, 26 bp, Homo sapiens
ctctgaccttgactttctgtggtcct

SEQ ID NO: 127368 - DNA, 26 bp, Homo sapiens
tctgaccttgactttctgtggtcctt

SEQ ID NO: 127369 - DNA, 26 bp, Homo sapiens
ctgaccttgactttctgtggtccttt

SEQ ID NO: 127370 - DNA, 26 bp, Homo sapiens
tgaccttgactttctgtggtcctttc

SEQ ID NO: 127371 - DNA, 26 bp, Homo sapiens
gaccttgactttctgtggtcctttct

SEQ ID NO: 127372 - DNA, 26 bp, Homo sapiens
accttgactttctgtggtcctttctt

SEQ ID NO: 127373 - DNA, 26 bp, Homo sapiens
ccttgactttctgtggtcctttcttc

SEQ ID NO: 127374 - DNA, 26 bp, Homo sapiens
cttgactttctgtggtcctttcttca

SEQ ID NO: 127375 - DNA, 26 bp, Homo sapiens
ttgactttctgtggtcctttcttcat

SEQ ID NO: 127376 - DNA, 26 bp, Homo sapiens
tgactttctgtggtcctttcttcatc

SEQ ID NO: 127377 - DNA, 26 bp, Homo sapiens
gactttctgtggtcctttcttcatca

SEQ ID NO: 127378 - DNA, 26 bp, Homo sapiens
actttctgtggtcctttcttcatcac

SEQ ID NO: 127379 - DNA, 26 bp, Homo sapiens
ctttctgtggtcctttcttcatcaca

SEQ ID NO: 127380 - DNA, 26 bp, Homo sapiens
tttctgtggtcctttcttcatcacat

SEQ ID NO: 127381 - DNA, 26 bp, Homo sapiens
ttctgtggtcctttcttcatcacatg

SEQ ID NO: 127382 - DNA, 26 bp, Homo sapiens
tctgtggtcctttcttcatcacatgt

SEQ ID NO: 127383 - DNA, 26 bp, Homo sapiens
ctgtggtcctttcttcatcacatgtt

SEQ ID NO: 127384 - DNA, 26 bp, Homo sapiens
tgtggtcctttcttcatcacatgttc

SEQ ID NO: 127385 - DNA, 26 bp, Homo sapiens
gtggtcctttcttcatcacatgttcc

SEQ ID NO: 127386 - DNA, 26 bp, Homo sapiens
tggtcctttcttcatcacatgttccc

SEQ ID NO: 127387 - DNA, 26 bp, Homo sapiens
ggtcctttcttcatcacatgttccct

SEQ ID NO: 127388 - DNA, 26 bp, Homo sapiens
gtcctttcttcatcacatgttccctc

SEQ ID NO: 127389 - DNA, 26 bp, Homo sapiens
tcctttcttcatcacatgttccctca

SEQ ID NO: 127390 - DNA, 26 bp, Homo sapiens
cctttcttcatcacatgttccctcac

SEQ ID NO: 127391 - DNA, 26 bp, Homo sapiens
ctttcttcatcacatgttccctcaca

SEQ ID NO: 127392 - DNA, 26 bp, Homo sapiens
tttcttcatcacatgttccctcacac

SEQ ID NO: 127393 - DNA, 26 bp, Homo sapiens
ttcttcatcacatgttccctcacacc

SEQ ID NO: 127394 - DNA, 26 bp, Homo sapiens
tcttcatcacatgttccctcacacct

SEQ ID NO: 127395 - DNA, 26 bp, Homo sapiens
cttcatcacatgttccctcacacctg

SEQ ID NO: 127396 - DNA, 26 bp, Homo sapiens
ttcatcacatgttccctcacacctgt

SEQ ID NO: 127397 - DNA, 26 bp, Homo sapiens
tcatcacatgttccctcacacctgtg

SEQ ID NO: 127398 - DNA, 26 bp, Homo sapiens
catcacatgttccctcacacctgtgc

SEQ ID NO: 127399 - DNA, 26 bp, Homo sapiens
atcacatgttccctcacacctgtgct

SEQ ID NO: 127400 - DNA, 26 bp, Homo sapiens
tcacatgttccctcacacctgtgctt

SEQ ID NO: 127401 - DNA, 26 bp, Homo sapiens
cacatgttccctcacacctgtgcttc

SEQ ID NO: 127402 - DNA, 26 bp, Homo sapiens
acatgttccctcacacctgtgcttct

SEQ ID NO: 127403 - DNA, 26 bp, Homo sapiens
catgttccctcacacctgtgcttctt

SEQ ID NO: 127404 - DNA, 26 bp, Homo sapiens
atgttccctcacacctgtgcttcttc

SEQ ID NO: 127405 - DNA, 26 bp, Homo sapiens
tgttccctcacacctgtgcttcttct

SEQ ID NO: 127406 - DNA, 26 bp, Homo sapiens
gttccctcacacctgtgcttcttctc

SEQ ID NO: 127407 - DNA, 26 bp, Homo sapiens
ttccctcacacctgtgcttcttctcc

SEQ ID NO: 127408 - DNA, 26 bp, Homo sapiens
tccctcacacctgtgcttcttctccc

SEQ ID NO: 127409 - DNA, 26 bp, Homo sapiens
ccctcacacctgtgcttcttctccct

SEQ ID NO: 127410 - DNA, 26 bp, Homo sapiens
cctcacacctgtgcttcttctccctc

SEQ ID NO: 127411 - DNA, 26 bp, Homo sapiens
ctcacacctgtgcttcttctccctca

SEQ ID NO: 127412 - DNA, 26 bp, Homo sapiens
tcacacctgtgcttcttctccctcag

SEQ ID NO: 127413 - DNA, 26 bp, Homo sapiens
cacacctgtgcttcttctccctcagg

SEQ ID NO: 127414 - DNA, 26 bp, Homo sapiens
acacctgtgcttcttctccctcagga

SEQ ID NO: 127415 - DNA, 26 bp, Homo sapiens
cacctgtgcttcttctccctcaggac

SEQ ID NO: 127416 - DNA, 26 bp, Homo sapiens
acctgtgcttcttctccctcaggacg

SEQ ID NO: 127417 - DNA, 26 bp, Homo sapiens
cctgtgcttcttctccctcaggacgc

SEQ ID NO: 127418 - DNA, 26 bp, Homo sapiens
ctgtgcttcttctccctcaggacgct

SEQ ID NO: 127419 - DNA, 26 bp, Homo sapiens
tgtgcttcttctccctcaggacgctc

SEQ ID NO: 127420 - DNA, 26 bp, Homo sapiens
gtgcttcttctccctcaggacgctcc

SEQ ID NO: 127421 - DNA, 26 bp, Homo sapiens
tgcttcttctccctcaggacgctcct

SEQ ID NO: 127422 - DNA, 26 bp, Homo sapiens
gcttcttctccctcaggacgctcctt

SEQ ID NO: 127423 - DNA, 26 bp, Homo sapiens
cttcttctccctcaggacgctccttt

SEQ ID NO: 127424 - DNA, 26 bp, Homo sapiens
ttcttctccctcaggacgctcctttc

SEQ ID NO: 127425 - DNA, 26 bp, Homo sapiens
tcttctccctcaggacgctcctttcc

SEQ ID NO: 127426 - DNA, 26 bp, Homo sapiens
cttctccctcaggacgctcctttccc

SEQ ID NO: 127427 - DNA, 26 bp, Homo sapiens
ttctccctcaggacgctcctttccca

SEQ ID NO: 127428 - DNA, 26 bp, Homo sapiens
tctccctcaggacgctcctttcccag

SEQ ID NO: 127429 - DNA, 26 bp, Homo sapiens
ctccctcaggacgctcctttcccaga

SEQ ID NO: 127430 - DNA, 26 bp, Homo sapiens
tccctcaggacgctcctttcccagaa

SEQ ID NO: 127431 - DNA, 26 bp, Homo sapiens
ccctcaggacgctcctttcccagaac

SEQ ID NO: 127432 - DNA, 26 bp, Homo sapiens
cctcaggacgctcctttcccagaaca

SEQ ID NO: 127433 - DNA, 26 bp, Homo sapiens
ctcaggacgctcctttcccagaacat

SEQ ID NO: 127434 - DNA, 26 bp, Homo sapiens
tcaggacgctcctttcccagaacata

SEQ ID NO: 127435 - DNA, 26 bp, Homo sapiens
caggacgctcctttcccagaacatac

SEQ ID NO: 127436 - DNA, 26 bp, Homo sapiens
aggacgctcctttcccagaacatact

SEQ ID NO: 127437 - DNA, 26 bp, Homo sapiens
ggacgctcctttcccagaacatactg

SEQ ID NO: 127438 - DNA, 26 bp, Homo sapiens
gacgctcctttcccagaacatactgc

SEQ ID NO: 127439 - DNA, 26 bp, Homo sapiens
acgctcctttcccagaacatactgca

SEQ ID NO: 127440 - DNA, 26 bp, Homo sapiens
cgctcctttcccagaacatactgcat

SEQ ID NO: 127441 - DNA, 26 bp, Homo sapiens
gctcctttcccagaacatactgcatt

SEQ ID NO: 127442 - DNA, 26 bp, Homo sapiens
ctcctttcccagaacatactgcattt

SEQ ID NO: 127443 - DNA, 26 bp, Homo sapiens
tcctttcccagaacatactgcatttt

SEQ ID NO: 127444 - DNA, 26 bp, Homo sapiens
cctttcccagaacatactgcattttc

SEQ ID NO: 127445 - DNA, 26 bp, Homo sapiens
ctttcccagaacatactgcattttct

SEQ ID NO: 127446 - DNA, 26 bp, Homo sapiens
tttcccagaacatactgcattttctg

SEQ ID NO: 127447 - DNA, 26 bp, Homo sapiens
ttcccagaacatactgcattttctga

SEQ ID NO: 127448 - DNA, 26 bp, Homo sapiens
tcccagaacatactgcattttctgac

SEQ ID NO: 127449 - DNA, 26 bp, Homo sapiens
cccagaacatactgcattttctgact

SEQ ID NO: 127450 - DNA, 26 bp, Homo sapiens
ccagaacatactgcattttctgactt

SEQ ID NO: 127451 - DNA, 26 bp, Homo sapiens
cagaacatactgcattttctgacttg

SEQ ID NO: 127452 - DNA, 26 bp, Homo sapiens
agaacatactgcattttctgacttgt

SEQ ID NO: 127453 - DNA, 26 bp, Homo sapiens
gaacatactgcattttctgacttgtc

SEQ ID NO: 127454 - DNA, 26 bp, Homo sapiens
aacatactgcattttctgacttgtca

SEQ ID NO: 127455 - DNA, 26 bp, Homo sapiens
acatactgcattttctgacttgtcag

SEQ ID NO: 127456 - DNA, 26 bp, Homo sapiens
catactgcattttctgacttgtcagg

SEQ ID NO: 127457 - DNA, 26 bp, Homo sapiens
atactgcattttctgacttgtcaggc

SEQ ID NO: 127458 - DNA, 26 bp, Homo sapiens
tactgcattttctgacttgtcaggct

SEQ ID NO: 127459 - DNA, 26 bp, Homo sapiens
actgcattttctgacttgtcaggctc

SEQ ID NO: 127460 - DNA, 26 bp, Homo sapiens
ctgcattttctgacttgtcaggctcg

SEQ ID NO: 127461 - DNA, 26 bp, Homo sapiens
tgcattttctgacttgtcaggctcgc

SEQ ID NO: 127462 - DNA, 26 bp, Homo sapiens
gcattttctgacttgtcaggctcgct

SEQ ID NO: 127463 - DNA, 26 bp, Homo sapiens
cattttctgacttgtcaggctcgctc

SEQ ID NO: 127464 - DNA, 26 bp, Homo sapiens
attttctgacttgtcaggctcgctca

SEQ ID NO: 127465 - DNA, 26 bp, Homo sapiens
ttttctgacttgtcaggctcgctcaa

SEQ ID NO: 127466 - DNA, 26 bp, Homo sapiens
tttctgacttgtcaggctcgctcaag

SEQ ID NO: 127467 - DNA, 26 bp, Homo sapiens
ttctgacttgtcaggctcgctcaaga

SEQ ID NO: 127468 - DNA, 26 bp, Homo sapiens
tctgacttgtcaggctcgctcaagac

SEQ ID NO: 127469 - DNA, 26 bp, Homo sapiens
ctgacttgtcaggctcgctcaagacg

SEQ ID NO: 127470 - DNA, 26 bp, Homo sapiens
tgacttgtcaggctcgctcaagacgt

SEQ ID NO: 127471 - DNA, 26 bp, Homo sapiens
gacttgtcaggctcgctcaagacgtg

SEQ ID NO: 127472 - DNA, 26 bp, Homo sapiens
acttgtcaggctcgctcaagacgtgt

SEQ ID NO: 127473 - DNA, 26 bp, Homo sapiens
cttgtcaggctcgctcaagacgtgtt

SEQ ID NO: 127474 - DNA, 26 bp, Homo sapiens
ttgtcaggctcgctcaagacgtgtta

SEQ ID NO: 127475 - DNA, 26 bp, Homo sapiens
tgtcaggctcgctcaagacgtgttat

SEQ ID NO: 127476 - DNA, 26 bp, Homo sapiens
gtcaggctcgctcaagacgtgttatt

SEQ ID NO: 127477 - DNA, 26 bp, Homo sapiens
tcaggctcgctcaagacgtgttattc

SEQ ID NO: 127478 - DNA, 26 bp, Homo sapiens
caggctcgctcaagacgtgttattcg

SEQ ID NO: 127479 - DNA, 26 bp, Homo sapiens
aggctcgctcaagacgtgttattcgc

SEQ ID NO: 127480 - DNA, 26 bp, Homo sapiens
ggctcgctcaagacgtgttattcgcc

SEQ ID NO: 127481 - DNA, 26 bp, Homo sapiens
gctcgctcaagacgtgttattcgcct

SEQ ID NO: 127482 - DNA, 26 bp, Homo sapiens
ctcgctcaagacgtgttattcgccta

SEQ ID NO: 127483 - DNA, 26 bp, Homo sapiens
tcgctcaagacgtgttattcgcctat

SEQ ID NO: 127484 - DNA, 26 bp, Homo sapiens
cgctcaagacgtgttattcgcctatg

SEQ ID NO: 127485 - DNA, 26 bp, Homo sapiens
gctcaagacgtgttattcgcctatgg

SEQ ID NO: 127486 - DNA, 26 bp, Homo sapiens
ctcaagacgtgttattcgcctatgga

SEQ ID NO: 127487 - DNA, 26 bp, Homo sapiens
tcaagacgtgttattcgcctatggaa

SEQ ID NO: 127488 - DNA, 26 bp, Homo sapiens
caagacgtgttattcgcctatggaac

SEQ ID NO: 127489 - DNA, 26 bp, Homo sapiens
aagacgtgttattcgcctatggaacc

SEQ ID NO: 127490 - DNA, 26 bp, Homo sapiens
agacgtgttattcgcctatggaacct

SEQ ID NO: 127491 - DNA, 26 bp, Homo sapiens
gacgtgttattcgcctatggaacctt

SEQ ID NO: 127492 - DNA, 26 bp, Homo sapiens
acgtgttattcgcctatggaaccttt

SEQ ID NO: 127493 - DNA, 26 bp, Homo sapiens
cgtgttattcgcctatggaacctttc

SEQ ID NO: 127494 - DNA, 26 bp, Homo sapiens
gtgttattcgcctatggaacctttcc

SEQ ID NO: 127495 - DNA, 26 bp, Homo sapiens
tgttattcgcctatggaacctttcca

SEQ ID NO: 127496 - DNA, 26 bp, Homo sapiens
gttattcgcctatggaacctttccat

SEQ ID NO: 127497 - DNA, 26 bp, Homo sapiens
ttattcgcctatggaacctttccatc

SEQ ID NO: 127498 - DNA, 26 bp, Homo sapiens
tattcgcctatggaacctttccatcc

SEQ ID NO: 127499 - DNA, 26 bp, Homo sapiens
attcgcctatggaacctttccatcca

SEQ ID NO: 127500 - DNA, 26 bp, Homo sapiens
ttcgcctatggaacctttccatccac

SEQ ID NO: 127501 - DNA, 26 bp, Homo sapiens
tcgcctatggaacctttccatccacc

SEQ ID NO: 127502 - DNA, 26 bp, Homo sapiens
cgcctatggaacctttccatccacct

SEQ ID NO: 127503 - DNA, 26 bp, Homo sapiens
gcctatggaacctttccatccacctc

SEQ ID NO: 127504 - DNA, 26 bp, Homo sapiens
cctatggaacctttccatccacctcc

SEQ ID NO: 127505 - DNA, 26 bp, Homo sapiens
ctatggaacctttccatccacctcca

SEQ ID NO: 127506 - DNA, 26 bp, Homo sapiens
tatggaacctttccatccacctccac

SEQ ID NO: 127507 - DNA, 26 bp, Homo sapiens
atggaacctttccatccacctccacc

SEQ ID NO: 127508 - DNA, 26 bp, Homo sapiens
tggaacctttccatccacctccacct

SEQ ID NO: 127509 - DNA, 26 bp, Homo sapiens
ggaacctttccatccacctccaccta

SEQ ID NO: 127510 - DNA, 26 bp, Homo sapiens
gaacctttccatccacctccacctag

SEQ ID NO: 127511 - DNA, 26 bp, Homo sapiens
aacctttccatccacctccacctagt

SEQ ID NO: 127512 - DNA, 26 bp, Homo sapiens
acctttccatccacctccacctagtg

SEQ ID NO: 127513 - DNA, 26 bp, Homo sapiens
cctttccatccacctccacctagtga

SEQ ID NO: 127514 - DNA, 26 bp, Homo sapiens
ctttccatccacctccacctagtgaa

SEQ ID NO: 127515 - DNA, 26 bp, Homo sapiens
tttccatccacctccacctagtgaac

SEQ ID NO: 127516 - DNA, 26 bp, Homo sapiens
ttccatccacctccacctagtgaacc

SEQ ID NO: 127517 - DNA, 26 bp, Homo sapiens
tccatccacctccacctagtgaaccc

SEQ ID NO: 127518 - DNA, 26 bp, Homo sapiens
ccatccacctccacctagtgaaccca

SEQ ID NO: 127519 - DNA, 26 bp, Homo sapiens
catccacctccacctagtgaacccat

SEQ ID NO: 127520 - DNA, 26 bp, Homo sapiens
atccacctccacctagtgaacccatt

SEQ ID NO: 127521 - DNA, 26 bp, Homo sapiens
tccacctccacctagtgaacccattc

SEQ ID NO: 127522 - DNA, 26 bp, Homo sapiens
ccacctccacctagtgaacccattca

SEQ ID NO: 127523 - DNA, 26 bp, Homo sapiens
cacctccacctagtgaacccattcat

SEQ ID NO: 127524 - DNA, 26 bp, Homo sapiens
acctccacctagtgaacccattcatt

SEQ ID NO: 127525 - DNA, 26 bp, Homo sapiens
cctccacctagtgaacccattcatta

SEQ ID NO: 127526 - DNA, 26 bp, Homo sapiens
ctccacctagtgaacccattcattag

SEQ ID NO: 127527 - DNA, 26 bp, Homo sapiens
tccacctagtgaacccattcattaga

SEQ ID NO: 127528 - DNA, 26 bp, Homo sapiens
ccacctagtgaacccattcattagag

SEQ ID NO: 127529 - DNA, 26 bp, Homo sapiens
cacctagtgaacccattcattagagc

SEQ ID NO: 127530 - DNA, 26 bp, Homo sapiens
acctagtgaacccattcattagagca

SEQ ID NO: 127531 - DNA, 26 bp, Homo sapiens
cctagtgaacccattcattagagcaa

SEQ ID NO: 127532 - DNA, 26 bp, Homo sapiens
ctagtgaacccattcattagagcaag

SEQ ID NO: 127533 - DNA, 26 bp, Homo sapiens
tagtgaacccattcattagagcaagt

SEQ ID NO: 127534 - DNA, 26 bp, Homo sapiens
agtgaacccattcattagagcaagtt

SEQ ID NO: 127535 - DNA, 26 bp, Homo sapiens
gtgaacccattcattagagcaagttc

SEQ ID NO: 127536 - DNA, 26 bp, Homo sapiens
tgaacccattcattagagcaagttca

SEQ ID NO: 127537 - DNA, 26 bp, Homo sapiens
gaacccattcattagagcaagttcaa

SEQ ID NO: 127538 - DNA, 26 bp, Homo sapiens
aacccattcattagagcaagttcaaa

SEQ ID NO: 127539 - DNA, 26 bp, Homo sapiens
acccattcattagagcaagttcaaat

SEQ ID NO: 127540 - DNA, 26 bp, Homo sapiens
cccattcattagagcaagttcaaatg

SEQ ID NO: 127541 - DNA, 26 bp, Homo sapiens
ccattcattagagcaagttcaaatgc

SEQ ID NO: 127542 - DNA, 26 bp, Homo sapiens
cattcattagagcaagttcaaatgct

SEQ ID NO: 127543 - DNA, 26 bp, Homo sapiens
attcattagagcaagttcaaatgctg

SEQ ID NO: 127544 - DNA, 26 bp, Homo sapiens
ttcattagagcaagttcaaatgctgt

SEQ ID NO: 127545 - DNA, 26 bp, Homo sapiens
tcattagagcaagttcaaatgctgtc

SEQ ID NO: 127546 - DNA, 26 bp, Homo sapiens
cattagagcaagttcaaatgctgtct

SEQ ID NO: 127547 - DNA, 26 bp, Homo sapiens
attagagcaagttcaaatgctgtctc

SEQ ID NO: 127548 - DNA, 26 bp, Homo sapiens
ttagagcaagttcaaatgctgtctcc

SEQ ID NO: 127549 - DNA, 26 bp, Homo sapiens
tagagcaagttcaaatgctgtctcct

SEQ ID NO: 127550 - DNA, 26 bp, Homo sapiens
agagcaagttcaaatgctgtctcctc

SEQ ID NO: 127551 - DNA, 26 bp, Homo sapiens
gagcaagttcaaatgctgtctcctca

SEQ ID NO: 127552 - DNA, 26 bp, Homo sapiens
agcaagttcaaatgctgtctcctcag

SEQ ID NO: 127553 - DNA, 26 bp, Homo sapiens
gcaagttcaaatgctgtctcctcaga

SEQ ID NO: 127554 - DNA, 26 bp, Homo sapiens
caagttcaaatgctgtctcctcagag

SEQ ID NO: 127555 - DNA, 26 bp, Homo sapiens
aagttcaaatgctgtctcctcagagg

SEQ ID NO: 127556 - DNA, 26 bp, Homo sapiens
agttcaaatgctgtctcctcagaggc

SEQ ID NO: 127557 - DNA, 26 bp, Homo sapiens
gttcaaatgctgtctcctcagaggct

SEQ ID NO: 127558 - DNA, 26 bp, Homo sapiens
ttcaaatgctgtctcctcagaggctc

SEQ ID NO: 127559 - DNA, 26 bp, Homo sapiens
tcaaatgctgtctcctcagaggctcc

SEQ ID NO: 127560 - DNA, 26 bp, Homo sapiens
caaatgctgtctcctcagaggctccc

SEQ ID NO: 127561 - DNA, 26 bp, Homo sapiens
aaatgctgtctcctcagaggctccct

SEQ ID NO: 127562 - DNA, 26 bp, Homo sapiens
aatgctgtctcctcagaggctccctg

SEQ ID NO: 127563 - DNA, 26 bp, Homo sapiens
atgctgtctcctcagaggctccctgg

SEQ ID NO: 127564 - DNA, 26 bp, Homo sapiens
tgctgtctcctcagaggctccctgga

SEQ ID NO: 127565 - DNA, 26 bp, Homo sapiens
gctgtctcctcagaggctccctggat

SEQ ID NO: 127566 - DNA, 26 bp, Homo sapiens
ctgtctcctcagaggctccctggatg

SEQ ID NO: 127567 - DNA, 26 bp, Homo sapiens
tgtctcctcagaggctccctggatgc

SEQ ID NO: 127568 - DNA, 26 bp, Homo sapiens
gtctcctcagaggctccctggatgct

SEQ ID NO: 127569 - DNA, 26 bp, Homo sapiens
tctcctcagaggctccctggatgctt

SEQ ID NO: 127570 - DNA, 26 bp, Homo sapiens
ctcctcagaggctccctggatgcttt

SEQ ID NO: 127571 - DNA, 26 bp, Homo sapiens
tcctcagaggctccctggatgctttc

SEQ ID NO: 127572 - DNA, 26 bp, Homo sapiens
cctcagaggctccctggatgctttca

SEQ ID NO: 127573 - DNA, 26 bp, Homo sapiens
ctcagaggctccctggatgctttcaa

SEQ ID NO: 127574 - DNA, 26 bp, Homo sapiens
tcagaggctccctggatgctttcaaa

SEQ ID NO: 127575 - DNA, 26 bp, Homo sapiens
cagaggctccctggatgctttcaaat

SEQ ID NO: 127576 - DNA, 26 bp, Homo sapiens
agaggctccctggatgctttcaaatg

SEQ ID NO: 127577 - DNA, 26 bp, Homo sapiens
gaggctccctggatgctttcaaatgg

SEQ ID NO: 127578 - DNA, 26 bp, Homo sapiens
aggctccctggatgctttcaaatgga

SEQ ID NO: 127579 - DNA, 26 bp, Homo sapiens
ggctccctggatgctttcaaatggac

SEQ ID NO: 127580 - DNA, 26 bp, Homo sapiens
gctccctggatgctttcaaatggact

SEQ ID NO: 127581 - DNA, 26 bp, Homo sapiens
ctccctggatgctttcaaatggactt

SEQ ID NO: 127582 - DNA, 26 bp, Homo sapiens
tccctggatgctttcaaatggactta

SEQ ID NO: 127583 - DNA, 26 bp, Homo sapiens
ccctggatgctttcaaatggacttaa

SEQ ID NO: 127584 - DNA, 26 bp, Homo sapiens
cctggatgctttcaaatggacttaat

SEQ ID NO: 127585 - DNA, 26 bp, Homo sapiens
ctggatgctttcaaatggacttaatc

SEQ ID NO: 127586 - DNA, 26 bp, Homo sapiens
tggatgctttcaaatggacttaatct

SEQ ID NO: 127587 - DNA, 26 bp, Homo sapiens
ggatgctttcaaatggacttaatctc

SEQ ID NO: 127588 - DNA, 26 bp, Homo sapiens
gatgctttcaaatggacttaatctcc

SEQ ID NO: 127589 - DNA, 26 bp, Homo sapiens
atgctttcaaatggacttaatctccc

SEQ ID NO: 127590 - DNA, 26 bp, Homo sapiens
tgctttcaaatggacttaatctcccc

SEQ ID NO: 127591 - DNA, 26 bp, Homo sapiens
gctttcaaatggacttaatctcccct

SEQ ID NO: 127592 - DNA, 26 bp, Homo sapiens
ctttcaaatggacttaatctcccctc

SEQ ID NO: 127593 - DNA, 26 bp, Homo sapiens
tttcaaatggacttaatctcccctct

SEQ ID NO: 127594 - DNA, 26 bp, Homo sapiens
ttcaaatggacttaatctcccctctt

SEQ ID NO: 127595 - DNA, 26 bp, Homo sapiens
tcaaatggacttaatctcccctcttt

SEQ ID NO: 127596 - DNA, 26 bp, Homo sapiens
caaatggacttaatctcccctctttc

SEQ ID NO: 127597 - DNA, 26 bp, Homo sapiens
aaatggacttaatctcccctctttct

SEQ ID NO: 127598 - DNA, 26 bp, Homo sapiens
aatggacttaatctcccctctttctg

SEQ ID NO: 127599 - DNA, 26 bp, Homo sapiens
atggacttaatctcccctctttctgt

SEQ ID NO: 127600 - DNA, 26 bp, Homo sapiens
tggacttaatctcccctctttctgta

SEQ ID NO: 127601 - DNA, 26 bp, Homo sapiens
ggacttaatctcccctctttctgtaa

SEQ ID NO: 127602 - DNA, 26 bp, Homo sapiens
gacttaatctcccctctttctgtaat

SEQ ID NO: 127603 - DNA, 26 bp, Homo sapiens
acttaatctcccctctttctgtaatc

SEQ ID NO: 127604 - DNA, 26 bp, Homo sapiens
cttaatctcccctctttctgtaatca

SEQ ID NO: 127605 - DNA, 26 bp, Homo sapiens
ttaatctcccctctttctgtaatcat

SEQ ID NO: 127606 - DNA, 26 bp, Homo sapiens
taatctcccctctttctgtaatcatc

SEQ ID NO: 127607 - DNA, 26 bp, Homo sapiens
aatctcccctctttctgtaatcatct

SEQ ID NO: 127608 - DNA, 26 bp, Homo sapiens
atctcccctctttctgtaatcatctt

SEQ ID NO: 127609 - DNA, 26 bp, Homo sapiens
tctcccctctttctgtaatcatctta

SEQ ID NO: 127610 - DNA, 26 bp, Homo sapiens
ctcccctctttctgtaatcatcttaa

SEQ ID NO: 127611 - DNA, 26 bp, Homo sapiens
tcccctctttctgtaatcatcttaaa

SEQ ID NO: 127612 - DNA, 26 bp, Homo sapiens
cccctctttctgtaatcatcttaaag

SEQ ID NO: 127613 - DNA, 26 bp, Homo sapiens
ccctctttctgtaatcatcttaaagt

SEQ ID NO: 127614 - DNA, 26 bp, Homo sapiens
cctctttctgtaatcatcttaaagtt

SEQ ID NO: 127615 - DNA, 26 bp, Homo sapiens
ctctttctgtaatcatcttaaagttt

SEQ ID NO: 127616 - DNA, 26 bp, Homo sapiens
tctttctgtaatcatcttaaagttta

SEQ ID NO: 127617 - DNA, 26 bp, Homo sapiens
ctttctgtaatcatcttaaagtttac

SEQ ID NO: 127618 - DNA, 26 bp, Homo sapiens
tttctgtaatcatcttaaagtttact

SEQ ID NO: 127619 - DNA, 26 bp, Homo sapiens
ttctgtaatcatcttaaagtttactc

SEQ ID NO: 127620 - DNA, 26 bp, Homo sapiens
tctgtaatcatcttaaagtttactca

SEQ ID NO: 127621 - DNA, 26 bp, Homo sapiens
ctgtaatcatcttaaagtttactcat

SEQ ID NO: 127622 - DNA, 26 bp, Homo sapiens
tgtaatcatcttaaagtttactcatc

SEQ ID NO: 127623 - DNA, 26 bp, Homo sapiens
gtaatcatcttaaagtttactcatca

SEQ ID NO: 127624 - DNA, 26 bp, Homo sapiens
taatcatcttaaagtttactcatcat

SEQ ID NO: 127625 - DNA, 26 bp, Homo sapiens
aatcatcttaaagtttactcatcatg

SEQ ID NO: 127626 - DNA, 26 bp, Homo sapiens
atcatcttaaagtttactcatcatgc

SEQ ID NO: 127627 - DNA, 26 bp, Homo sapiens
tcatcttaaagtttactcatcatgcc

SEQ ID NO: 127628 - DNA, 26 bp, Homo sapiens
catcttaaagtttactcatcatgcct

SEQ ID NO: 127629 - DNA, 26 bp, Homo sapiens
atcttaaagtttactcatcatgcctt

SEQ ID NO: 127630 - DNA, 26 bp, Homo sapiens
tcttaaagtttactcatcatgccttg

SEQ ID NO: 127631 - DNA, 26 bp, Homo sapiens
cttaaagtttactcatcatgccttga

SEQ ID NO: 127632 - DNA, 26 bp, Homo sapiens
ttaaagtttactcatcatgccttgaa

SEQ ID NO: 127633 - DNA, 26 bp, Homo sapiens
taaagtttactcatcatgccttgaat

SEQ ID NO: 127634 - DNA, 26 bp, Homo sapiens
aaagtttactcatcatgccttgaatc

SEQ ID NO: 127635 - DNA, 26 bp, Homo sapiens
aagtttactcatcatgccttgaatca

SEQ ID NO: 127636 - DNA, 26 bp, Homo sapiens
agtttactcatcatgccttgaatcag

SEQ ID NO: 127637 - DNA, 26 bp, Homo sapiens
gtttactcatcatgccttgaatcagt

SEQ ID NO: 127638 - DNA, 26 bp, Homo sapiens
tttactcatcatgccttgaatcagtt

SEQ ID NO: 127639 - DNA, 26 bp, Homo sapiens
ttactcatcatgccttgaatcagtta

SEQ ID NO: 127640 - DNA, 26 bp, Homo sapiens
tactcatcatgccttgaatcagttaa

SEQ ID NO: 127641 - DNA, 26 bp, Homo sapiens
actcatcatgccttgaatcagttaac

SEQ ID NO: 127642 - DNA, 26 bp, Homo sapiens
ctcatcatgccttgaatcagttaact

SEQ ID NO: 127643 - DNA, 26 bp, Homo sapiens
tcatcatgccttgaatcagttaacta

SEQ ID NO: 127644 - DNA, 26 bp, Homo sapiens
catcatgccttgaatcagttaactag

SEQ ID NO: 127645 - DNA, 26 bp, Homo sapiens
atcatgccttgaatcagttaactagg

SEQ ID NO: 127646 - DNA, 26 bp, Homo sapiens
tcatgccttgaatcagttaactaggt

SEQ ID NO: 127647 - DNA, 26 bp, Homo sapiens
catgccttgaatcagttaactaggta

SEQ ID NO: 127648 - DNA, 26 bp, Homo sapiens
atgccttgaatcagttaactaggtat

SEQ ID NO: 127649 - DNA, 26 bp, Homo sapiens
tgccttgaatcagttaactaggtatg

SEQ ID NO: 127650 - DNA, 26 bp, Homo sapiens
gccttgaatcagttaactaggtatgg

SEQ ID NO: 127651 - DNA, 26 bp, Homo sapiens
ccttgaatcagttaactaggtatggg

SEQ ID NO: 127652 - DNA, 26 bp, Homo sapiens
cttgaatcagttaactaggtatgggt

SEQ ID NO: 127653 - DNA, 26 bp, Homo sapiens
ttgaatcagttaactaggtatgggtc

SEQ ID NO: 127654 - DNA, 26 bp, Homo sapiens
tgaatcagttaactaggtatgggtct

SEQ ID NO: 127655 - DNA, 26 bp, Homo sapiens
gaatcagttaactaggtatgggtctg

SEQ ID NO: 127656 - DNA, 26 bp, Homo sapiens
aatcagttaactaggtatgggtctgc

SEQ ID NO: 127657 - DNA, 26 bp, Homo sapiens
atcagttaactaggtatgggtctgcc

SEQ ID NO: 127658 - DNA, 26 bp, Homo sapiens
tcagttaactaggtatgggtctgcct

SEQ ID NO: 127659 - DNA, 26 bp, Homo sapiens
cagttaactaggtatgggtctgcctc

SEQ ID NO: 127660 - DNA, 26 bp, Homo sapiens
agttaactaggtatgggtctgcctcc

SEQ ID NO: 127661 - DNA, 26 bp, Homo sapiens
gttaactaggtatgggtctgcctccc

SEQ ID NO: 127662 - DNA, 26 bp, Homo sapiens
ttaactaggtatgggtctgcctcccc

SEQ ID NO: 127663 - DNA, 26 bp, Homo sapiens
taactaggtatgggtctgcctcccca

SEQ ID NO: 127664 - DNA, 26 bp, Homo sapiens
aactaggtatgggtctgcctccccac

SEQ ID NO: 127665 - DNA, 26 bp, Homo sapiens
actaggtatgggtctgcctccccact

SEQ ID NO: 127666 - DNA, 26 bp, Homo sapiens
ctaggtatgggtctgcctccccacta

SEQ ID NO: 127667 - DNA, 26 bp, Homo sapiens
taggtatgggtctgcctccccactag

SEQ ID NO: 127668 - DNA, 26 bp, Homo sapiens
aggtatgggtctgcctccccactaga

SEQ ID NO: 127669 - DNA, 26 bp, Homo sapiens
ggtatgggtctgcctccccactagat

SEQ ID NO: 127670 - DNA, 26 bp, Homo sapiens
gtatgggtctgcctccccactagatt

SEQ ID NO: 127671 - DNA, 26 bp, Homo sapiens
tatgggtctgcctccccactagattg

SEQ ID NO: 127672 - DNA, 26 bp, Homo sapiens
atgggtctgcctccccactagattgt

SEQ ID NO: 127673 - DNA, 26 bp, Homo sapiens
tgggtctgcctccccactagattgta

SEQ ID NO: 127674 - DNA, 26 bp, Homo sapiens
gggtctgcctccccactagattgtaa

SEQ ID NO: 127675 - DNA, 26 bp, Homo sapiens
ggtctgcctccccactagattgtaag

SEQ ID NO: 127676 - DNA, 26 bp, Homo sapiens
gtctgcctccccactagattgtaagc

SEQ ID NO: 127677 - DNA, 26 bp, Homo sapiens
tctgcctccccactagattgtaagct

SEQ ID NO: 127678 - DNA, 26 bp, Homo sapiens
ctgcctccccactagattgtaagctt

SEQ ID NO: 127679 - DNA, 26 bp, Homo sapiens
tgcctccccactagattgtaagcttg

SEQ ID NO: 127680 - DNA, 26 bp, Homo sapiens
gcctccccactagattgtaagcttga

SEQ ID NO: 127681 - DNA, 26 bp, Homo sapiens
cctccccactagattgtaagcttgaa

SEQ ID NO: 127682 - DNA, 26 bp, Homo sapiens
ctccccactagattgtaagcttgaag

SEQ ID NO: 127683 - DNA, 26 bp, Homo sapiens
tccccactagattgtaagcttgaagc

SEQ ID NO: 127684 - DNA, 26 bp, Homo sapiens
ccccactagattgtaagcttgaagca

SEQ ID NO: 127685 - DNA, 26 bp, Homo sapiens
cccactagattgtaagcttgaagcag

SEQ ID NO: 127686 - DNA, 26 bp, Homo sapiens
ccactagattgtaagcttgaagcagg

SEQ ID NO: 127687 - DNA, 26 bp, Homo sapiens
cactagattgtaagcttgaagcaggg

SEQ ID NO: 127688 - DNA, 26 bp, Homo sapiens
actagattgtaagcttgaagcagggt

SEQ ID NO: 127689 - DNA, 26 bp, Homo sapiens
ctagattgtaagcttgaagcagggtt

SEQ ID NO: 127690 - DNA, 26 bp, Homo sapiens
tagattgtaagcttgaagcagggttt

SEQ ID NO: 127691 - DNA, 26 bp, Homo sapiens
agattgtaagcttgaagcagggttta

SEQ ID NO: 127692 - DNA, 26 bp, Homo sapiens
gattgtaagcttgaagcagggtttaa

SEQ ID NO: 127693 - DNA, 26 bp, Homo sapiens
attgtaagcttgaagcagggtttaaa

SEQ ID NO: 127694 - DNA, 26 bp, Homo sapiens
ttgtaagcttgaagcagggtttaaat

SEQ ID NO: 127695 - DNA, 26 bp, Homo sapiens
tgtaagcttgaagcagggtttaaatt

SEQ ID NO: 127696 - DNA, 26 bp, Homo sapiens
gtaagcttgaagcagggtttaaattt

SEQ ID NO: 127697 - DNA, 26 bp, Homo sapiens
taagcttgaagcagggtttaaattta

SEQ ID NO: 127698 - DNA, 26 bp, Homo sapiens
aagcttgaagcagggtttaaatttat

SEQ ID NO: 127699 - DNA, 26 bp, Homo sapiens
agcttgaagcagggtttaaatttatc

SEQ ID NO: 127700 - DNA, 26 bp, Homo sapiens
gcttgaagcagggtttaaatttatct

SEQ ID NO: 127701 - DNA, 26 bp, Homo sapiens
cttgaagcagggtttaaatttatctt

SEQ ID NO: 127702 - DNA, 26 bp, Homo sapiens
ttgaagcagggtttaaatttatcttt

SEQ ID NO: 127703 - DNA, 26 bp, Homo sapiens
tgaagcagggtttaaatttatctttg

SEQ ID NO: 127704 - DNA, 26 bp, Homo sapiens
gaagcagggtttaaatttatctttgg

SEQ ID NO: 127705 - DNA, 26 bp, Homo sapiens
aagcagggtttaaatttatctttggg

SEQ ID NO: 127706 - DNA, 26 bp, Homo sapiens
agcagggtttaaatttatctttgggc

SEQ ID NO: 127707 - DNA, 26 bp, Homo sapiens
gcagggtttaaatttatctttgggct

SEQ ID NO: 127708 - DNA, 26 bp, Homo sapiens
cagggtttaaatttatctttgggcta

SEQ ID NO: 127709 - DNA, 26 bp, Homo sapiens
agggtttaaatttatctttgggctac

SEQ ID NO: 127710 - DNA, 26 bp, Homo sapiens
gggtttaaatttatctttgggctaca

SEQ ID NO: 127711 - DNA, 26 bp, Homo sapiens
ggtttaaatttatctttgggctacat

SEQ ID NO: 127712 - DNA, 26 bp, Homo sapiens
gtttaaatttatctttgggctacata

SEQ ID NO: 127713 - DNA, 26 bp, Homo sapiens
tttaaatttatctttgggctacataa

SEQ ID NO: 127714 - DNA, 26 bp, Homo sapiens
ttaaatttatctttgggctacataat

SEQ ID NO: 127715 - DNA, 26 bp, Homo sapiens
taaatttatctttgggctacataatg

SEQ ID NO: 127716 - DNA, 26 bp, Homo sapiens
aaatttatctttgggctacataatgc

SEQ ID NO: 127717 - DNA, 26 bp, Homo sapiens
aatttatctttgggctacataatgct

SEQ ID NO: 127718 - DNA, 26 bp, Homo sapiens
atttatctttgggctacataatgctc

SEQ ID NO: 127719 - DNA, 26 bp, Homo sapiens
tttatctttgggctacataatgctca

SEQ ID NO: 127720 - DNA, 26 bp, Homo sapiens
ttatctttgggctacataatgctcag

SEQ ID NO: 127721 - DNA, 26 bp, Homo sapiens
tatctttgggctacataatgctcagt

SEQ ID NO: 127722 - DNA, 26 bp, Homo sapiens
atctttgggctacataatgctcagtt

SEQ ID NO: 127723 - DNA, 26 bp, Homo sapiens
tctttgggctacataatgctcagttg

SEQ ID NO: 127724 - DNA, 26 bp, Homo sapiens
ctttgggctacataatgctcagttga

SEQ ID NO: 127725 - DNA, 26 bp, Homo sapiens
tttgggctacataatgctcagttgac

SEQ ID NO: 127726 - DNA, 26 bp, Homo sapiens
ttgggctacataatgctcagttgacc

SEQ ID NO: 127727 - DNA, 26 bp, Homo sapiens
tgggctacataatgctcagttgacct

SEQ ID NO: 127728 - DNA, 26 bp, Homo sapiens
gggctacataatgctcagttgaccta

SEQ ID NO: 127729 - DNA, 26 bp, Homo sapiens
ggctacataatgctcagttgacctac

SEQ ID NO: 127730 - DNA, 26 bp, Homo sapiens
gctacataatgctcagttgacctaca

SEQ ID NO: 127731 - DNA, 26 bp, Homo sapiens
ctacataatgctcagttgacctacac

SEQ ID NO: 127732 - DNA, 26 bp, Homo sapiens
tacataatgctcagttgacctacact

SEQ ID NO: 127733 - DNA, 26 bp, Homo sapiens
acataatgctcagttgacctacactg

SEQ ID NO: 127734 - DNA, 26 bp, Homo sapiens
cataatgctcagttgacctacactga

SEQ ID NO: 127735 - DNA, 26 bp, Homo sapiens
ataatgctcagttgacctacactgaa

SEQ ID NO: 127736 - DNA, 26 bp, Homo sapiens
taatgctcagttgacctacactgaac

SEQ ID NO: 127737 - DNA, 26 bp, Homo sapiens
aatgctcagttgacctacactgaaca

SEQ ID NO: 127738 - DNA, 26 bp, Homo sapiens
atgctcagttgacctacactgaacag

SEQ ID NO: 127739 - DNA, 26 bp, Homo sapiens
tgctcagttgacctacactgaacaga

SEQ ID NO: 127740 - DNA, 26 bp, Homo sapiens
gctcagttgacctacactgaacagag

SEQ ID NO: 127741 - DNA, 26 bp, Homo sapiens
ctcagttgacctacactgaacagagt

SEQ ID NO: 127742 - DNA, 26 bp, Homo sapiens
tcagttgacctacactgaacagagtc

SEQ ID NO: 127743 - DNA, 26 bp, Homo sapiens
cagttgacctacactgaacagagtcc

SEQ ID NO: 127744 - DNA, 26 bp, Homo sapiens
agttgacctacactgaacagagtccc

SEQ ID NO: 127745 - DNA, 26 bp, Homo sapiens
gttgacctacactgaacagagtccct

SEQ ID NO: 127746 - DNA, 26 bp, Homo sapiens
ttgacctacactgaacagagtccctc

SEQ ID NO: 127747 - DNA, 26 bp, Homo sapiens
tgacctacactgaacagagtccctcc

SEQ ID NO: 127748 - DNA, 26 bp, Homo sapiens
gacctacactgaacagagtccctccc

SEQ ID NO: 127749 - DNA, 26 bp, Homo sapiens
acctacactgaacagagtccctccca

SEQ ID NO: 127750 - DNA, 26 bp, Homo sapiens
cctacactgaacagagtccctcccag

SEQ ID NO: 127751 - DNA, 26 bp, Homo sapiens
ctacactgaacagagtccctcccaga

SEQ ID NO: 127752 - DNA, 26 bp, Homo sapiens
tacactgaacagagtccctcccagat

SEQ ID NO: 127753 - DNA, 26 bp, Homo sapiens
acactgaacagagtccctcccagatc

SEQ ID NO: 127754 - DNA, 26 bp, Homo sapiens
cactgaacagagtccctcccagatcc

SEQ ID NO: 127755 - DNA, 26 bp, Homo sapiens
actgaacagagtccctcccagatcct

SEQ ID NO: 127756 - DNA, 26 bp, Homo sapiens
ctgaacagagtccctcccagatcctt

SEQ ID NO: 127757 - DNA, 26 bp, Homo sapiens
tgaacagagtccctcccagatccttt

SEQ ID NO: 127758 - DNA, 26 bp, Homo sapiens
gaacagagtccctcccagatcctttt

SEQ ID NO: 127759 - DNA, 26 bp, Homo sapiens
aacagagtccctcccagatccttttc

SEQ ID NO: 127760 - DNA, 26 bp, Homo sapiens
acagagtccctcccagatccttttcc

SEQ ID NO: 127761 - DNA, 26 bp, Homo sapiens
cagagtccctcccagatccttttcct

SEQ ID NO: 127762 - DNA, 26 bp, Homo sapiens
agagtccctcccagatccttttccta

SEQ ID NO: 127763 - DNA, 26 bp, Homo sapiens
gagtccctcccagatccttttcctaa

SEQ ID NO: 127764 - DNA, 26 bp, Homo sapiens
agtccctcccagatccttttcctaac

SEQ ID NO: 127765 - DNA, 26 bp, Homo sapiens
gtccctcccagatccttttcctaact

SEQ ID NO: 127766 - DNA, 26 bp, Homo sapiens
tccctcccagatccttttcctaactt

SEQ ID NO: 127767 - DNA, 26 bp, Homo sapiens
ccctcccagatccttttcctaactta

SEQ ID NO: 127768 - DNA, 26 bp, Homo sapiens
cctcccagatccttttcctaacttaa

SEQ ID NO: 127769 - DNA, 26 bp, Homo sapiens
ctcccagatccttttcctaacttaat

SEQ ID NO: 127770 - DNA, 26 bp, Homo sapiens
tcccagatccttttcctaacttaatc

SEQ ID NO: 127771 - DNA, 26 bp, Homo sapiens
cccagatccttttcctaacttaatcc

SEQ ID NO: 127772 - DNA, 26 bp, Homo sapiens
ccagatccttttcctaacttaatcca

SEQ ID NO: 127773 - DNA, 26 bp, Homo sapiens
cagatccttttcctaacttaatccaa

SEQ ID NO: 127774 - DNA, 26 bp, Homo sapiens
agatccttttcctaacttaatccaaa

SEQ ID NO: 127775 - DNA, 26 bp, Homo sapiens
gatccttttcctaacttaatccaaac

SEQ ID NO: 127776 - DNA, 26 bp, Homo sapiens
atccttttcctaacttaatccaaacc

SEQ ID NO: 127777 - DNA, 26 bp, Homo sapiens
tccttttcctaacttaatccaaacct

SEQ ID NO: 127778 - DNA, 26 bp, Homo sapiens
ccttttcctaacttaatccaaacctg

SEQ ID NO: 127779 - DNA, 26 bp, Homo sapiens
cttttcctaacttaatccaaacctgc

SEQ ID NO: 127780 - DNA, 26 bp, Homo sapiens
ttttcctaacttaatccaaacctgcc

SEQ ID NO: 127781 - DNA, 26 bp, Homo sapiens
tttcctaacttaatccaaacctgccc

SEQ ID NO: 127782 - DNA, 26 bp, Homo sapiens
ttcctaacttaatccaaacctgcccc

SEQ ID NO: 127783 - DNA, 26 bp, Homo sapiens
tcctaacttaatccaaacctgcccca

SEQ ID NO: 127784 - DNA, 26 bp, Homo sapiens
cctaacttaatccaaacctgccccaa

SEQ ID NO: 127785 - DNA, 26 bp, Homo sapiens
ctaacttaatccaaacctgccccaac

SEQ ID NO: 127786 - DNA, 26 bp, Homo sapiens
taacttaatccaaacctgccccaacc

SEQ ID NO: 127787 - DNA, 26 bp, Homo sapiens
aacttaatccaaacctgccccaacct

SEQ ID NO: 127788 - DNA, 26 bp, Homo sapiens
acttaatccaaacctgccccaacctg

SEQ ID NO: 127789 - DNA, 26 bp, Homo sapiens
cttaatccaaacctgccccaacctga

SEQ ID NO: 127790 - DNA, 26 bp, Homo sapiens
ttaatccaaacctgccccaacctgag

SEQ ID NO: 127791 - DNA, 26 bp, Homo sapiens
taatccaaacctgccccaacctgagt

SEQ ID NO: 127792 - DNA, 26 bp, Homo sapiens
aatccaaacctgccccaacctgagtc

SEQ ID NO: 127793 - DNA, 26 bp, Homo sapiens
atccaaacctgccccaacctgagtcc

SEQ ID NO: 127794 - DNA, 26 bp, Homo sapiens
tccaaacctgccccaacctgagtcct

SEQ ID NO: 127795 - DNA, 26 bp, Homo sapiens
ccaaacctgccccaacctgagtcctc

SEQ ID NO: 127796 - DNA, 26 bp, Homo sapiens
caaacctgccccaacctgagtcctca

SEQ ID NO: 127797 - DNA, 26 bp, Homo sapiens
aaacctgccccaacctgagtcctcaa

SEQ ID NO: 127798 - DNA, 26 bp, Homo sapiens
aacctgccccaacctgagtcctcaaa

SEQ ID NO: 127799 - DNA, 26 bp, Homo sapiens
acctgccccaacctgagtcctcaaac

SEQ ID NO: 127800 - DNA, 26 bp, Homo sapiens
cctgccccaacctgagtcctcaaact

SEQ ID NO: 127801 - DNA, 26 bp, Homo sapiens
ctgccccaacctgagtcctcaaactg

SEQ ID NO: 127802 - DNA, 26 bp, Homo sapiens
tgccccaacctgagtcctcaaactga

SEQ ID NO: 127803 - DNA, 26 bp, Homo sapiens
gccccaacctgagtcctcaaactgac

SEQ ID NO: 127804 - DNA, 26 bp, Homo sapiens
ccccaacctgagtcctcaaactgacc

SEQ ID NO: 127805 - DNA, 26 bp, Homo sapiens
cccaacctgagtcctcaaactgaccc

SEQ ID NO: 127806 - DNA, 26 bp, Homo sapiens
ccaacctgagtcctcaaactgaccct

SEQ ID NO: 127807 - DNA, 26 bp, Homo sapiens
caacctgagtcctcaaactgaccctc

SEQ ID NO: 127808 - DNA, 26 bp, Homo sapiens
aacctgagtcctcaaactgaccctct

SEQ ID NO: 127809 - DNA, 26 bp, Homo sapiens
acctgagtcctcaaactgaccctctt

SEQ ID NO: 127810 - DNA, 26 bp, Homo sapiens
cctgagtcctcaaactgaccctcttc

SEQ ID NO: 127811 - DNA, 26 bp, Homo sapiens
ctgagtcctcaaactgaccctcttca

SEQ ID NO: 127812 - DNA, 26 bp, Homo sapiens
tgagtcctcaaactgaccctcttcaa

SEQ ID NO: 127813 - DNA, 26 bp, Homo sapiens
gagtcctcaaactgaccctcttcaat

SEQ ID NO: 127814 - DNA, 26 bp, Homo sapiens
agtcctcaaactgaccctcttcaatc

SEQ ID NO: 127815 - DNA, 26 bp, Homo sapiens
gtcctcaaactgaccctcttcaatct

SEQ ID NO: 127816 - DNA, 26 bp, Homo sapiens
tcctcaaactgaccctcttcaatctc

SEQ ID NO: 127817 - DNA, 26 bp, Homo sapiens
cctcaaactgaccctcttcaatctca

SEQ ID NO: 127818 - DNA, 26 bp, Homo sapiens
ctcaaactgaccctcttcaatctcat

SEQ ID NO: 127819 - DNA, 26 bp, Homo sapiens
tcaaactgaccctcttcaatctcatt

SEQ ID NO: 127820 - DNA, 26 bp, Homo sapiens
caaactgaccctcttcaatctcatta

SEQ ID NO: 127821 - DNA, 26 bp, Homo sapiens
aaactgaccctcttcaatctcattat

SEQ ID NO: 127822 - DNA, 26 bp, Homo sapiens
aactgaccctcttcaatctcattatt

SEQ ID NO: 127823 - DNA, 26 bp, Homo sapiens
actgaccctcttcaatctcattattc

SEQ ID NO: 127824 - DNA, 26 bp, Homo sapiens
ctgaccctcttcaatctcattattct

SEQ ID NO: 127825 - DNA, 26 bp, Homo sapiens
tgaccctcttcaatctcattattctt

SEQ ID NO: 127826 - DNA, 26 bp, Homo sapiens
gaccctcttcaatctcattattcttt

SEQ ID NO: 127827 - DNA, 26 bp, Homo sapiens
accctcttcaatctcattattctttt

SEQ ID NO: 127828 - DNA, 26 bp, Homo sapiens
ccctcttcaatctcattattcttttc

SEQ ID NO: 127829 - DNA, 26 bp, Homo sapiens
cctcttcaatctcattattcttttcc

SEQ ID NO: 127830 - DNA, 26 bp, Homo sapiens
ctcttcaatctcattattcttttcca

SEQ ID NO: 127831 - DNA, 26 bp, Homo sapiens
tcttcaatctcattattcttttccag

SEQ ID NO: 127832 - DNA, 26 bp, Homo sapiens
cttcaatctcattattcttttccagg

SEQ ID NO: 127833 - DNA, 26 bp, Homo sapiens
ttcaatctcattattcttttccaggc

SEQ ID NO: 127834 - DNA, 26 bp, Homo sapiens
tcaatctcattattcttttccaggcc

SEQ ID NO: 127835 - DNA, 26 bp, Homo sapiens
caatctcattattcttttccaggcct

SEQ ID NO: 127836 - DNA, 26 bp, Homo sapiens
aatctcattattcttttccaggcctg

SEQ ID NO: 127837 - DNA, 26 bp, Homo sapiens
atctcattattcttttccaggcctgt

SEQ ID NO: 127838 - DNA, 26 bp, Homo sapiens
tctcattattcttttccaggcctgtt

SEQ ID NO: 127839 - DNA, 26 bp, Homo sapiens
ctcattattcttttccaggcctgttc

SEQ ID NO: 127840 - DNA, 26 bp, Homo sapiens
tcattattcttttccaggcctgttcc

SEQ ID NO: 127841 - DNA, 26 bp, Homo sapiens
cattattcttttccaggcctgttcct

SEQ ID NO: 127842 - DNA, 26 bp, Homo sapiens
attattcttttccaggcctgttcctc

SEQ ID NO: 127843 - DNA, 26 bp, Homo sapiens
ttattcttttccaggcctgttcctcc

SEQ ID NO: 127844 - DNA, 26 bp, Homo sapiens
tattcttttccaggcctgttcctcca

SEQ ID NO: 127845 - DNA, 26 bp, Homo sapiens
attcttttccaggcctgttcctccaa

SEQ ID NO: 127846 - DNA, 26 bp, Homo sapiens
ttcttttccaggcctgttcctccaat

SEQ ID NO: 127847 - DNA, 26 bp, Homo sapiens
tcttttccaggcctgttcctccaatt

SEQ ID NO: 127848 - DNA, 26 bp, Homo sapiens
cttttccaggcctgttcctccaattg

SEQ ID NO: 127849 - DNA, 26 bp, Homo sapiens
ttttccaggcctgttcctccaattga

SEQ ID NO: 127850 - DNA, 26 bp, Homo sapiens
tttccaggcctgttcctccaattgaa

SEQ ID NO: 127851 - DNA, 26 bp, Homo sapiens
ttccaggcctgttcctccaattgaat

SEQ ID NO: 127852 - DNA, 26 bp, Homo sapiens
tccaggcctgttcctccaattgaatc

SEQ ID NO: 127853 - DNA, 26 bp, Homo sapiens
ccaggcctgttcctccaattgaatcc

SEQ ID NO: 127854 - DNA, 26 bp, Homo sapiens
caggcctgttcctccaattgaatccc

SEQ ID NO: 127855 - DNA, 26 bp, Homo sapiens
aggcctgttcctccaattgaatccca

SEQ ID NO: 127856 - DNA, 26 bp, Homo sapiens
ggcctgttcctccaattgaatcccaa

SEQ ID NO: 127857 - DNA, 26 bp, Homo sapiens
gcctgttcctccaattgaatcccaat

SEQ ID NO: 127858 - DNA, 26 bp, Homo sapiens
cctgttcctccaattgaatcccaatg

SEQ ID NO: 127859 - DNA, 26 bp, Homo sapiens
ctgttcctccaattgaatcccaatgc

SEQ ID NO: 127860 - DNA, 26 bp, Homo sapiens
tgttcctccaattgaatcccaatgca

SEQ ID NO: 127861 - DNA, 26 bp, Homo sapiens
gttcctccaattgaatcccaatgcat

SEQ ID NO: 127862 - DNA, 26 bp, Homo sapiens
ttcctccaattgaatcccaatgcatc

SEQ ID NO: 127863 - DNA, 26 bp, Homo sapiens
tcctccaattgaatcccaatgcatcc

SEQ ID NO: 127864 - DNA, 26 bp, Homo sapiens
cctccaattgaatcccaatgcatcct

SEQ ID NO: 127865 - DNA, 26 bp, Homo sapiens
ctccaattgaatcccaatgcatcctc

SEQ ID NO: 127866 - DNA, 26 bp, Homo sapiens
tccaattgaatcccaatgcatcctcc

SEQ ID NO: 127867 - DNA, 26 bp, Homo sapiens
ccaattgaatcccaatgcatcctcca

SEQ ID NO: 127868 - DNA, 26 bp, Homo sapiens
caattgaatcccaatgcatcctccac

SEQ ID NO: 127869 - DNA, 26 bp, Homo sapiens
aattgaatcccaatgcatcctccact

SEQ ID NO: 127870 - DNA, 26 bp, Homo sapiens
attgaatcccaatgcatcctccactg

SEQ ID NO: 127871 - DNA, 26 bp, Homo sapiens
ttgaatcccaatgcatcctccactga

SEQ ID NO: 127872 - DNA, 26 bp, Homo sapiens
tgaatcccaatgcatcctccactgag

SEQ ID NO: 127873 - DNA, 26 bp, Homo sapiens
gaatcccaatgcatcctccactgaga

SEQ ID NO: 127874 - DNA, 26 bp, Homo sapiens
aatcccaatgcatcctccactgagac

SEQ ID NO: 127875 - DNA, 26 bp, Homo sapiens
atcccaatgcatcctccactgagact

SEQ ID NO: 127876 - DNA, 26 bp, Homo sapiens
tcccaatgcatcctccactgagactc

SEQ ID NO: 127877 - DNA, 26 bp, Homo sapiens
cccaatgcatcctccactgagactca

SEQ ID NO: 127878 - DNA, 26 bp, Homo sapiens
ccaatgcatcctccactgagactcaa

SEQ ID NO: 127879 - DNA, 26 bp, Homo sapiens
caatgcatcctccactgagactcaac

SEQ ID NO: 127880 - DNA, 26 bp, Homo sapiens
aatgcatcctccactgagactcaact

SEQ ID NO: 127881 - DNA, 26 bp, Homo sapiens
atgcatcctccactgagactcaactc

SEQ ID NO: 127882 - DNA, 26 bp, Homo sapiens
tgcatcctccactgagactcaactcc

SEQ ID NO: 127883 - DNA, 26 bp, Homo sapiens
gcatcctccactgagactcaactcct

SEQ ID NO: 127884 - DNA, 26 bp, Homo sapiens
catcctccactgagactcaactcctg

SEQ ID NO: 127885 - DNA, 26 bp, Homo sapiens
atcctccactgagactcaactcctgg

SEQ ID NO: 127886 - DNA, 26 bp, Homo sapiens
tcctccactgagactcaactcctggt

SEQ ID NO: 127887 - DNA, 26 bp, Homo sapiens
cctccactgagactcaactcctggtg

SEQ ID NO: 127888 - DNA, 26 bp, Homo sapiens
ctccactgagactcaactcctggtgc

SEQ ID NO: 127889 - DNA, 26 bp, Homo sapiens
tccactgagactcaactcctggtgcc

SEQ ID NO: 127890 - DNA, 26 bp, Homo sapiens
ccactgagactcaactcctggtgcca

SEQ ID NO: 127891 - DNA, 26 bp, Homo sapiens
cactgagactcaactcctggtgccag

SEQ ID NO: 127892 - DNA, 26 bp, Homo sapiens
actgagactcaactcctggtgccagc

SEQ ID NO: 127893 - DNA, 26 bp, Homo sapiens
ctgagactcaactcctggtgccagct

SEQ ID NO: 127894 - DNA, 26 bp, Homo sapiens
tgagactcaactcctggtgccagctc

SEQ ID NO: 127895 - DNA, 26 bp, Homo sapiens
gagactcaactcctggtgccagctct

SEQ ID NO: 127896 - DNA, 26 bp, Homo sapiens
agactcaactcctggtgccagctcta

SEQ ID NO: 127897 - DNA, 26 bp, Homo sapiens
gactcaactcctggtgccagctctag

SEQ ID NO: 127898 - DNA, 26 bp, Homo sapiens
actcaactcctggtgccagctctaga

SEQ ID NO: 127899 - DNA, 26 bp, Homo sapiens
ctcaactcctggtgccagctctagag

SEQ ID NO: 127900 - DNA, 26 bp, Homo sapiens
tcaactcctggtgccagctctagaga

SEQ ID NO: 127901 - DNA, 26 bp, Homo sapiens
caactcctggtgccagctctagagag

SEQ ID NO: 127902 - DNA, 26 bp, Homo sapiens
aactcctggtgccagctctagagagc

SEQ ID NO: 127903 - DNA, 26 bp, Homo sapiens
actcctggtgccagctctagagagca

SEQ ID NO: 127904 - DNA, 26 bp, Homo sapiens
ctcctggtgccagctctagagagcag

SEQ ID NO: 127905 - DNA, 26 bp, Homo sapiens
tcctggtgccagctctagagagcaga

SEQ ID NO: 127906 - DNA, 26 bp, Homo sapiens
cctggtgccagctctagagagcagag

SEQ ID NO: 127907 - DNA, 26 bp, Homo sapiens
ctggtgccagctctagagagcagaga

SEQ ID NO: 127908 - DNA, 26 bp, Homo sapiens
tggtgccagctctagagagcagagat

SEQ ID NO: 127909 - DNA, 26 bp, Homo sapiens
ggtgccagctctagagagcagagata

SEQ ID NO: 127910 - DNA, 26 bp, Homo sapiens
gtgccagctctagagagcagagatac

SEQ ID NO: 127911 - DNA, 26 bp, Homo sapiens
tgccagctctagagagcagagataca

SEQ ID NO: 127912 - DNA, 26 bp, Homo sapiens
gccagctctagagagcagagatacac

SEQ ID NO: 127913 - DNA, 26 bp, Homo sapiens
ccagctctagagagcagagatacact

SEQ ID NO: 127914 - DNA, 26 bp, Homo sapiens
cagctctagagagcagagatacactt

SEQ ID NO: 127915 - DNA, 26 bp, Homo sapiens
agctctagagagcagagatacacttc

SEQ ID NO: 127916 - DNA, 26 bp, Homo sapiens
gctctagagagcagagatacacttcc

SEQ ID NO: 127917 - DNA, 26 bp, Homo sapiens
ctctagagagcagagatacacttcca

SEQ ID NO: 127918 - DNA, 26 bp, Homo sapiens
tctagagagcagagatacacttccac

SEQ ID NO: 127919 - DNA, 26 bp, Homo sapiens
ctagagagcagagatacacttccacc

SEQ ID NO: 127920 - DNA, 26 bp, Homo sapiens
tagagagcagagatacacttccacct

SEQ ID NO: 127921 - DNA, 26 bp, Homo sapiens
agagagcagagatacacttccaccta

SEQ ID NO: 127922 - DNA, 26 bp, Homo sapiens
gagagcagagatacacttccacctac

SEQ ID NO: 127923 - DNA, 26 bp, Homo sapiens
agagcagagatacacttccacctacc

SEQ ID NO: 127924 - DNA, 26 bp, Homo sapiens
gagcagagatacacttccacctaccc

SEQ ID NO: 127925 - DNA, 26 bp, Homo sapiens
agcagagatacacttccacctaccca

SEQ ID NO: 127926 - DNA, 26 bp, Homo sapiens
gcagagatacacttccacctacccac

SEQ ID NO: 127927 - DNA, 26 bp, Homo sapiens
cagagatacacttccacctacccact

SEQ ID NO: 127928 - DNA, 26 bp, Homo sapiens
agagatacacttccacctacccactg

SEQ ID NO: 127929 - DNA, 26 bp, Homo sapiens
gagatacacttccacctacccactgt

SEQ ID NO: 127930 - DNA, 26 bp, Homo sapiens
agatacacttccacctacccactgtt

SEQ ID NO: 127931 - DNA, 26 bp, Homo sapiens
gatacacttccacctacccactgttt

SEQ ID NO: 127932 - DNA, 26 bp, Homo sapiens
atacacttccacctacccactgtttc

SEQ ID NO: 127933 - DNA, 26 bp, Homo sapiens
tacacttccacctacccactgtttca

SEQ ID NO: 127934 - DNA, 26 bp, Homo sapiens
acacttccacctacccactgtttcat

SEQ ID NO: 127935 - DNA, 26 bp, Homo sapiens
cacttccacctacccactgtttcatg

SEQ ID NO: 127936 - DNA, 26 bp, Homo sapiens
acttccacctacccactgtttcatgg

SEQ ID NO: 127937 - DNA, 26 bp, Homo sapiens
cttccacctacccactgtttcatggc
